(19) United States
(12) Patent Application Publication
(10) Pub. No.: US 2006/0253917 A1
(43) Pub. Date: Nov. 9, 2006

(54) Cell proliferation-related polypeptides and uses therefor

(76) Inventor: Bret Cooper, Laurel, MD (US)

Correspondence Address: JENKINS, WILSON, TAYLOR & HUNT, P. A., 3100 TOWER BLVD, SUITE 1200, DURHAM, NC, 27707, US

(21) Appl. No.: 10/533,232

(22) PCT Filed: Dec. 23, 2003
(86) PCT No.: PCT/US03/41200

§ 371 Date: Nov. 22, 2005

Related U.S. Application Data
(60) Provisional application No. 60/436,565, filed on Dec. 26, 2002.

(51) Int. Cl. C07H 21/04; C12N 15/82; C12N 5/04; A01H 1/00

(52) U.S. Cl. 800/278; 435/468; 435/419; 536/23.6

(57) ABSTRACT

Disclosed are proteins, and nucleic acids encoding such proteins, involved in or associated with cell proliferation, senesence, differentiation, development, and stress response in plants. Also disclosed are uses for such proteins.

### CROSS REFERENCE TO RELATED APPLICATIONS

[0001] This application is based on and claims priority to U.S. Provisional Application Ser. No. 60/436,565, filed Dec. 26, 2002, which is herein incorporated by reference in its entirety.

### TECHNICAL FIELD

[0002] The presently disclosed subject matter relates, in general, to transgenic plants. More particularly, the presently disclosed subject matter relates to cell proliferation-related polypeptides, nucleic acid molecues encoding the polypeptides, and uses thereof.

### SEQUENCE LISTING PROVIDED ON CD-R

[0003] The Sequence Listing associated with the instant disclosure has been submitted as a 1.5 MB file on CD-R (in triplicate) instead of on paper. Each CD-R is marked in indelible ink to identify the Applicants, Title, File Name (1392-10-19 PCT.ST25.txt)), Creation Date (Dec. 23, 2003), Computer System (IBM-PC/MS-DOS/MS-Windows), and Docket No. (1392-10-19 PCT). The Sequence Listing submitted on CD-R is hereby incorporated by reference into the instant disclosure.

### Table of Abbreviations

[0004] 2,4-D—2,4-dichlorophenoxyacetic acid
[0005] 53BP1—p53-binding protein
[0006] ABA—abscisic acid
[0007] ABC—ATP-binding cassettes
[0008] ADPGlc—ADP-glucose
[0009] AMV—Alfalfa Mosaic Virus
[0010] AOBP—ascorbate oxidase promoter binding protein
[0011] AOS—active oxygen species
[0012] APC—Adenomatous Polyposis Coli
[0013] APP—amyloid precursor protein
[0014] BAP—benzylamino purine
[0015] bp—basepair(s)
[0016] BiP—human immunoglobulin heavy-chain binding protein
[0017] BR—brassinosteroid
[0018] BRCT—BRCA1 C-terminus
[0019] BRI1—brassinosteroid-insensitive 1
[0020] bZIP—basic leucine zipper domain
[0021] CalS—callose synthase
[0022] CaM—calmodulin
[0023] CaMV—cauliflower mosaic virus
[0024] cDNA—complementary DNA
[0025] CDK—cyclin dependent kinase
[0026] CNS—central nervous system
[0027] CPO—coproporphyrinogen III oxidase
[0028] CRT—calreticulin
[0029] DHFR—dihydrofolate reductase
[0030] EDTA—ethylenediamine tetraacetic acid
[0031] eIF3—eukaryotic initiation factor 3
[0032] eIF4E—eukaryotic initiation factor 4E
[0033] ELISAs—enzyme-linked immunosorbent assays
[0034] EMCV—encephalomyocarditis virus
[0035] EPSP—5-enolpyruvylshikimate-3-phosphate
[0036] EPSPS—5-enolpyruvylshikimate-3-phosphate synthase
[0037] ER—endoplasmic reticulum
[0038] ESTs—Expressed Sequence Tags.
[0039] FPD—Functional Protein Domain
[0040] FTZ-F1—fushitarazu factor 1
[0041] GA—gibberellin
[0042] GUS—β-glucuronidase
[0043] HD—histone deacetylase
[0044] HLH—helix-loop-helix
[0045] HR—hypersensitive response
[0046] HSPs—heat shock proteins
[0047] IAA—indole acetic acid
[0048] INCENP—inner centromere protein
[0049] JA—jasmonic acid
[0050] kb—kilobase(s)
[0051] KCBP—kinesin-like calmodulin-binding protein
[0052] KNOX—knotted-like homeobox
[0053] LR—local resistance
[0054] MCMV—Maize Chlorotic Mottle Virus
[0055] MDMV—Maize Dwarf Mosaic Virus
[0056] MIP—Major Intrinsic Protein
[0057] MRP—multidrug resistance-associated protein
[0058] MT—microtubule
[0059] NPTII—neomycin phosphotransferase II
[0060] OsDAD1—O. sativa Defender Against Apoptotic Death 1
[0061] Pcps—pyrrolidone carboxyl peptidase
[0062] PGA—3-phosphoglyceric acid
[0063] P-gp—P-glycoprotein
[0064] PH—pleckstrin homology
[0065] PMI—phosphomannose isomerase
[0066] PI4P5K—phosphatidylinositol-4-phosphate 5-kinase
[0067] PP2A—type 2A serine/threonine protein phosphatase
[0068] PPDK—pyruvate orthophosphate dikinase
[0069] PR—pathogenesis-related
[0070] pRB—retinoblastoma protein
[0071] PTGS—post-transcriptional gene silencing
[0072] R₀—a parental transformant
[0073] RAB—responsive to abscisic acid
[0074] RB—retinoblastoma
[0075] RNAi—RNA interference
[0076] RUBISCO—ribulose-1,5-bisphosphate carboxylase/oxygenase
[0077] RuBP—ribulose 1,5-bisphosphate
[0078] SA—salicylic acid
[0079] SAR—systemic acquired resistance
[0080] SDS—sodium dodecyl sulfate
[0081] SITIP—salt stress induced tonoplast intrinsic protein
[0082] SSC—standard saline citrate (1×SSC is 0.15 M NaCl, 0.015 M sodium citrate, pH 7.0)
[0083] PCR—polymerase chain reaction
[0084] SSS—soluble starch synthase
[0085] TDP—transcription factor E2F/dimerization partner
[0086] TEV—Tobacco Etch Virus
[0087] Tₘ—thermal melting point
[0088] TMRI—Torrey Mesa Research Institute
[0089] TMV—Tobacco Mosaic Virus
[0090] UBPs—ubiquitin-specific proteases

### Amino Acid Abbreviations and Corresponding mRNA Codons

[0091]

| | 3- | 1- | |
|---|---|---|---|
| Amino Acid | Letter | Letter | mRNA Codons |
| Alanine | Ala | A | GCA GCC GCG GCU |
| Arginine | Arg | R | AGA AGG CGA CGC CGG CGU |
| Asparagine | Asn | N | AAC AAU |
| Aspartic Acid | Asp | D | GAC GAU |
| Cysteine | Cys | C | UGC UGU |
| Glutamic Acid | Glu | E | GAA GAG |
| Glutamine | Gln | Q | CAA CAG |
| Glycine | Gly | G | GGA GGC GGG GGU |
| Histidine | His | H | CAC CAU |
| Isoleucine | Ile | I | AUA AUC AUU |
| Leucine | Leu | L | UUA UUG CUA CUC CUG CUU |
| Lysine | Lys | K | AAA AAG |
| Methionine | Met | M | AUG |
| Proline | Pro | P | CCA CCC CCG CCU |
| Phenylalanine | Phe | F | UUC UUU |
| Serine | Ser | S | ACG AGU UCA UCC UCG UCU |
| Threonine | Thr | T | ACA ACC ACG ACU |
| Tryptophan | Trp | W | UGG |
| Tyrosine | Tyr | Y | UAC UAU |
| Valine | Val | V | GUA GUC GUG GUU |

### BACKGROUND ART

[0092] As some of the major human staples, monocot plants such as rice, corn, and wheat have been a target of genetic engineering for higher yields and resistance to diseases, pests, and environmental stresses of various kinds. The timing of the transition from vegetative growth to flowering, for example, is an important step in plant development that determines the quality and quantity of most crop species by affecting the balance between vegetative and reproductive growth. Therefore, control of flowering time in genetically engineered cereal crops is important in agriculture. Knowledge of the proteins and molecular interactions associated with cell cycle processes, development, and stress response in monocot plants, such as rice, could lead to important applications in agriculture. Modulation of these interactions can be exploited to effect changes in plant development or growth that can result in increased crop yield and, in addition, can be used to increase tolerance to environmental stress conditions.

[0093] Similarly, the development of plant organs (e.g., root and stem), and the ability of a plant to respond to stress and to defend itself from insects and pathogens are likewise important targets for genetic engineering. Genes encoding proteins involved in the plant response to pathogens are important to agriculture, as their discovery can allow genetic manipulation of crops to obtain plants with enhanced or reduced disease resistance.

[0094] Thus, there is a need to identify proteins that are involved in plant growth (including cell cycle and senescence), plant development, and plant responses to stress. Knowledge of the interactions of such proteins will allow opportunities to produce enhanced food crops.

### SUMMARY

[0095] This Summary lists several embodiments of the presently disclosed subject matter, and in many cases lists variations and permutations of these embodiments. This Summary is merely exemplary of the numerous and varied embodiments. Mention of one or more representative features of a given embodiment is likewise exemplary. Such an embodiment can typically exist with or without the feature(s) mentioned; likewise, those features can be applied to other embodiments of the presently disclosed subject matter, whether listed in this Summary or not. To avoid excessive repetition, this Summary does not list or suggest all possible combinations of such features.

[0096] The presently disclosed subject matter provides proteins and nucleic acid molecules encoding such proteins that are involved in the control and regulation of plant maturation and development, including proliferation, senescence, disease-resistance, stress-resistance, and differentiation. The presently disclosed subject matter provides compositions comprising at least one of the proteins described herein, as well as methods for using the proteins disclosed herein to affect plant maturation, development, and responses to stress.

[0097] The presently disclosed subject matter provides an isolated nucleic acid molecule encoding a cell proliferation-related polypeptide, wherein the polypeptide binds in a yeast two hybrid assay to a fragment of a protein selected from the group consisting of OsE2F1 (SEQ ID NO: 194), Os018989-4003 (SEQ ID NO: 2), OsE2F2 (SEQ ID NO: 10), OsS49462 (SEQ ID NO: 206), OsCYCOS2 (SEQ ID NO: 210), OsMADS45 (SEQ ID NO: 202), OsRAP1B (SEQ ID NO: 244), OsMADS6 (SEQ ID NO: 236), OsFDRMADS8 (SEQ ID NO: 228), OsMADS3 (SEQ ID NO: 232), OsMADS5 (SEQ ID NO: 234), OsMADS15 (SEQ ID NO: 240), OsHOS59 (SEQ ID NO: 258), OsGF14-c (SEQ ID NO: 278), OsDAD1 (SEQ ID NO: 292), Os006819-2510 (SEQ ID NO: 296), OsCRTC (SEQ ID NO: 300), OsSGT1 (SEQ ID NO: 310), OsERP (SEQ ID NO: 312), OsCHIB1 (SEQ ID NO: 318), OsCS (SEQ ID NO: 322), OsPP2A-2 (SEQ ID NO: 330), and OsCAA90866 (SEQ ID NO: 336). In one embodiment, the isolated nucleic acid molecule is derived from rice (Oryza sativa). In another embodiment, the isolated nucleic acid molecule comprises a nucleic acid sequence selected from the group consisting of odd numbered SEQ ID NOs: 1-191.

[0098] The presently disclosed subject matter also provides a description of interactions between cell proliferation-related proteins and polypeptides encoded by the isolated nucleic acid molecules disclosed herein. In one embodiment, the isolated nucleic acid molecule comprises a nucleic acid sequence of one of odd numbered SEQ ID NOs: 1-7 and the protein comprises an amino acid sequence of SEQ ID NO: 194. In another embodiment, the isolated nucleic acid molecule comprises a nucleic acid sequence of one of SEQ ID NOs: 9 and 11 and the protein comprises an amino acid sequence of SEQ ID NO: 2. In another embodiment, the isolated nucleic acid molecule comprises a nucleic acid sequence of one of SEQ ID NOs: 1 and 13 and the protein comprises an amino acid sequence of SEQ ID NO: 10. In another embodiment, the isolated nucleic acid molecule comprises a nucleic acid sequence of one of odd numbered SEQ ID NOs: 15-21 and the protein comprises an amino acid sequence of SEQ ID NO: 206. In another embodiment, the isolated nucleic acid molecule comprises a nucleic acid sequence of one of odd numbered SEQ ID NOs: 15, 17, 23-53 and the protein comprises an amino acid sequence of SEQ ID NO: 210. In another embodiment, the isolated nucleic acid molecule comprises a nucleic acid sequence of SEQ ID NO: 55 and the protein comprises an amino acid sequence of SEQ ID NO: 202. In another embodiment, the isolated nucleic acid molecule comprises a nucleic acid sequence of SEQ ID NO: 57 and the protein comprises an amino acid sequence of SEQ ID NO: 244. In another embodiment, the isolated nucleic acid molecule comprises a nucleic acid sequence of SEQ ID NO: 59 and the protein comprises an amino acid sequence of SEQ ID NO: 236. In another embodiment, the isolated nucleic acid molecule comprises a nucleic acid sequence of SEQ ID NO: 61 and the protein comprises an amino acid sequence of SEQ ID NO: 232. In another embodiment, the isolated nucleic acid molecule comprises a nucleic acid sequence of SEQ ID NO: 63 and the protein comprises an amino acid sequence of SEQ ID NO: 234. In another embodiment, the isolated nucleic acid molecule comprises a nucleic acid sequence of SEQ ID NO: 65 and the protein comprises an amino acid sequence of SEQ ID NO: 240. In another embodiment, the isolated nucleic acid molecule comprises a nucleic acid sequence of one of odd numbered SEQ ID NOs: 67-79 and the protein comprises an amino acid sequence of SEQ ID NO: 258. In another embodiment, the isolated nucleic acid molecule comprises a nucleic acid sequence of SEQ ID NO: 81 and the protein comprises an amino acid sequence of SEQ ID NO: 260. In another embodiment, the isolated nucleic acid molecule comprises a nucleic acid sequence of one of odd numbered SEQ ID NOs: 83-97 and the protein comprises an amino acid sequence of SEQ ID NO: 278. In another embodiment, the isolated nucleic acid molecule comprises a nucleic acid sequence of one of SEQ ID NOs: 89 and 99 and the protein comprises an amino acid sequence of SEQ ID NO: 286. In another embodiment, the isolated nucleic acid molecule comprises a nucleic acid sequence of one of odd numbered SEQ ID NOs: 101-105 and the protein comprises an amino acid sequence of SEQ ID NO: 296. In another embodiment, the isolated nucleic acid molecule comprises a nucleic acid sequence of SEQ ID NO: 107 and the protein comprises an amino acid sequence of SEQ ID NO: 300. In another embodiment, the isolated nucleic acid molecule comprises a nucleic acid sequence of SEQ ID NO: 109 and the protein comprises an amino acid sequence of SEQ ID NO: 304. In another embodiment, the isolated nucleic acid molecule comprises a nucleic acid sequence of one of odd numbered SEQ ID NOs: 111-123 and the protein comprises an amino acid sequence of SEQ ID NO: 310. In another embodiment, the isolated nucleic acid molecule comprises a nucleic acid sequence of one of odd numbered SEQ ID NOs: 125-147 and the protein comprises an amino acid sequence of SEQ ID NO: 312. In another embodiment, the isolated nucleic acid molecule comprises a nucleic acid sequence of one of odd numbered SEQ ID NOs: 151-157 and the protein comprises an amino acid sequence of SEQ ID NO: 318. In another embodiment, the isolated nucleic acid molecule comprises a nucleic acid sequence of one of odd numbered SEQ ID NOs: 159-175 and the protein comprises an amino acid sequence of SEQ ID NO: 322. In another embodiment, the isolated nucleic acid molecule comprises a nucleic acid sequence of one of odd numbered SEQ ID NOs: 177-175 and the protein comprises an amino acid sequence of SEQ ID NO: 330. And in still another embodiment, the isolated nucleic acid molecule comprises a nucleic acid sequence of one of odd numbered SEQ ID NOs: 177, 187-191 and the protein comprises an amino acid sequence of SEQ ID NO: 336.

[0099] The presently disclosed subject matter also provides an isolated nucleic acid molecule encoding a cell proliferation-related polypeptide, wherein the nucleic acid molecule is selected from the group consisting of:
[0100] (a) a nucleic acid molecule encoding a polypeptide comprising an amino acid sequence of one of even numbered SEQ ID NOs: 2-192;
[0101] (b) a nucleic acid molecule comprising a nucleic acid sequence of one of odd numbered SEQ ID NOs: 1-191;
[0102] (c) a nucleic acid molecule that has a nucleic acid sequence at least 90% identical to the nucleic acid sequence of the nucleic acid molecule of (a) or (b);
[0103] (d) a nucleic acid molecule that hybridizes to (a) or (b) under conditions of hybridization selected from the group consisting of:
   [0104] (i) 7% sodium dodecyl sulfate (SDS), 0.5 M NaPO4, 1 mM ethylenediamine tetraacetic acid (EDTA) at 50° C. with a final wash in 2× standard saline citrate (SSC), 0.1% SDS at 50° C.;
   [0105] (ii) 7% SDS, 0.5 M NaPO4, 1 mM EDTA at 50° C. with a final wash in 1×SSC, 0.1% SDS at 50° C.;
   [0106] (iii) 7% SDS, 0.5 M NaPO4, 1 mM EDTA at 50° C. with a final wash in 0.5×SSC, 0.1% SDS at 50° C.;
   [0107] (iv) 7% sodium dodecyl sulfate (SDS), 0.5 M NaPO4, 1 mM EDTA at 50° C. with a final wash in 0.1×SSC, 0.1% SDS at 50° C.; and
   [0108] (v) 7% sodium dodecyl sulfate (SDS), 0.5 M NaPO4, 1 mM EDTA at 50° C. with a final wash in 0.1×SSC, 0.1% SDS at 65° C.;
[0109] (e) a nucleic acid molecule comprising a nucleic acid sequence fully complementary to (a); and
[0110] (f) a nucleic acid molecule comprising a nucleic acid sequence that is the full reverse complement of (a).

[0111] The presently disclosed subject matter also provides an isolated cell proliferation-related polypeptide encoded by the disclosed isolated nucleic acid molecules, or a functional fragment, domain, or feature thereof.

[0112] The presently disclosed subject matter also provides a method for producing a polypeptide disclosed herein, the method comprising the steps of:
[0113] (a) growing cells comprising an expression cassette under suitable growth conditions, the expression cassette comprising a nucleic acid molecule as disclosed herein; and
[0114] (b) isolating the polypeptide from the cells.

[0115] The presently disclosed subject matter also provides a transgenic plant cell comprising an isolated nucleic acid molecule disclosed herein. In one embodiment, the plant is selected from the group consisting of corn (Zea mays), Brassica sp., alfalfa (Medicago sativa), rice (Oryza sativa ssp.), rye (Secale cereale), sorghum (Sorghum bicolor, Sorghum vulgare), pearl millet (Pennisetum glaucum), proso millet (Panicum miliaceum), foxtail millet (Setaria italica), finger millet (Eleusine coracana), sunflower (Helianthus annuus), safflower (Carthamus tinctorius), wheat (Triticum aestivum), soybean (Glycine max), tobacco (Nicotiana tabacum), potato (Solanum tuberosum), peanut (Arachis hypogaea), cotton, sweet potato (Ipomoea batatus), cassaya (Manihot esculenta), coffee (Cofea spp.), coconut (Cocos nucifera), pineapple (Ananas comosus), citrus trees (Citrus spp.), cocoa (Theobroma cacao), tea (Camellia sinensis), banana (Musa spp.), avocado (Persea ultilane), fig (Ficus casica), guava (Psidium guajava), mango (Mangifera indica), olive (Olea europaea), papaya (Carica papaya), cashew (Anacardium occidentale), macadamia (Macadamia integrifolia), almond (Prunus amygdalus), sugar beets (Beta vulgaris), sugarcane (Saccharum spp.), oats, duckweed (Lemna), barley, a vegetable, an ornamental, and a conifer. In another embodiment, the plant is rice (Oryza sativa ssp.). In one embodiment, the duckweed is selected from the group consisting of genus Lemna, genus Spirodela, genus Woffia, and genus Wofiella. In one embodiment, the vegetable is selected from the group consisting of tomatoes, lettuce, guar, locust bean, fenugreek, soybean, garden beans, cowpea, mungbean, lima bean, fava bean, lentils, chickpea, green bean, lima bean, pea, and members of the genus Cucumis. In one embodiment, the ornamental is selected from the group consisting of impatiens, Begonia, Pelargonium, Viola, Cyclamen, Verbena, Vinca, Tagetes, Primula, Saint Paulia, Agertum, Amaranthus, Antihirrhinum, Aquilegia, Cineraria, Clover, Cosmo, Cowpea, Dahlia, Datura, Delphinium, Gerbera, Gladiolus, Gloxinia, Hippeastrum, Mesembryanthemum, Salpiglossos, and Zinnia, azalea, hydrangea, hibiscus, rose, tulip, daffodil, petunia, carnation, poinsettia, and chrysanthemum. In one embodiment, the conifer is selected from the group consisting of loblolly pine, slash pine, ponderosa pine, lodgepole pine, Monterey pine, Douglas-fir, Western hemlock, Sitka spruce, redwood, silver fir, balsam fir, Western red cedar, and Alaska yellow-cedar.

[0116] In another embodiment, the transgenic plant is a plant selected from the group consisting of Acacia, aneth, artichoke, arugula, blackberry, canola, cilantro, clementines, escarole, eucalyptus, fennel, grapefruit, honey dew, jicama, kiwifruit, lemon, lime, mushroom, nut, okra, orange, parsley, persimmon, plantain, pomegranate, poplar, radiata pine, radicchio, Southern pine, sweetgum, tangerine, triticale, vine, yams, apple, pear, quince, cherry, apricot, melon, hemp, buckwheat, grape, raspberry, chenopodium, blueberry, nectarine, peach, plum, strawberry, watermelon, eggplant, pepper, cauliflower, Brassica, broccoli, cabbage, ultilan sprouts, onion, carrot, leek, beet, broad bean, celery, radish, pumpkin, endive, gourd, garlic, snapbean, spinach, squash, turnip, ultilane, and zucchini.

[0117] The presently disclosed subject matter also provides an isolated cell proliferation-related polypeptide, wherein the polypeptide binds in a yeast two hybrid assay to a fragment of a protein selected from the group consisting of OsE2F1 (SEQ ID NO: 194), Os018989-4003-(SEQ ID NO: 2), OsE2F2 (SEQ ID NO: 10), OsS49462 (SEQ ID NO: 206), OsCYCOS2 (SEQ ID NO: 210), OsMADS45 (SEQ ID NO: 202), OsRAP1B (SEQ ID NO: 244), OsMADS6 (SEQ ID NO: 236), OsFDRMADS8 (SEQ ID NO: 228), OsMADS3 (SEQ ID NO: 232), OsMADS5 (SEQ ID NO: 234), OsMADS15 (SEQ ID NO: 240), OsHOS59 (SEQ ID NO: 258), OsGF14-c (SEQ ID NO: 278), OsDAD1 (SEQ ID NO: 292), Os006819-2510 (SEQ ID NO: 296), OsCRTC (SEQ ID NO: 300), OsSGT1 (SEQ ID NO: 310), OsERP (SEQ ID NO: 312), OsCHIB1 (SEQ ID NO: 318), OsCS (SEQ ID NO: 322), OsPP2A-2 (SEQ ID NO: 330), and OsCAA90866 (SEQ ID NO: 336). In one embodiment, the isolated proliferation-related polypeptide is selected from the group consisting of (a) a polypeptide comprising an amino acid sequence of even numbered SEQ ID NOs: 2-192; and (b) a polypeptide comprising an amino acid sequence at least 80% similar to the polypeptide of (a) using the GCG Wisconsin Package SEQWEB® application of GAP with the default GAP analysis parameters. In another embodiment, the polypeptide comprises an amino acid sequence of one of even numbered SEQ ID NOs: 2-192.

[0118] The presently disclosed subject matter also provides an expression cassette comprising a nucleic acid molecule encoding a cell proliferation-related polypeptide disclosed herein. In one embodiment, the nucleic acid molecule encoding a cell proliferation-related polypeptide comprises a nucleic acid sequence selected from odd numbered SEQ ID NOs: 1-191. In one embodiment, the expression cassette further comprises a regulatory element operatively linked to the nucleic acid molecule. In one embodiment, the regulatory element comprises a promoter. In one embodiment, the promoter is a plant promoter. In another embodiment, the promoter is a constitutive promoter. In another embodiment, the promoter is a tissue-specific or a cell type-specific promoter. In one embodiment, the tissue-specific or cell type-specific promoter directs expression of the expression cassette in a location selected from the group consisting of epidermis, root, vascular tissue, meristem, cambium, cortex, pith, leaf, flower, seed, and combinations thereof.

[0119] The presently disclosed subject matter also provides a transgenic plant cell comprising a disclosed expression cassette. In one embodiment, the expression cassette comprises an isolated nucleic acid molecule comprising a nucleic acid sequence of one of odd numbered SEQ ID NOs: 1-191.

[0120] The presently disclosed subject matter also provides transgenic plants comprising a disclosed expression cassette, as well as transgenic seeds and progeny of the trangenic plants disclosed herein.

[0121] The presently disclosed subject matter also provides a method for modulating proliferation of a plant cell comprising introducing into the plant cell an expression cassette comprising an isolated nucleic acid molecule encoding a cell proliferation-related polypeptide, wherein the polypeptide binds in a yeast two hybrid assay to a fragment of a protein selected from the group consisting of OsE2F1 (SEQ ID NO: 194), Os018989-4003 (SEQ ID NO: 2), OsE2F2 (SEQ ID NO: 10), OsS49462 (SEQ ID NO: 206), OsCYCOS2 (SEQ ID NO: 210), OsMADS45 (SEQ ID NO: 202), OsRAP1B (SEQ ID NO: 244), OsMADS6 (SEQ ID NO: 236), OsFDRMADS8 (SEQ ID NO: 228), OsMADS3 (SEQ ID NO: 232), OsMADS5 (SEQ ID NO: 234), OsMADS15 (SEQ ID NO: 240), OsHOS59 (SEQ ID NO: 258), OsGF14-c (SEQ ID NO: 278), OsDAD1 (SEQ ID NO: 292), Os006819-2510 (SEQ ID NO: 296), OsCRTC (SEQ ID NO: 300), OsSGT1 (SEQ ID NO: 310), OsERP (SEQ ID NO: 312), OsCHIB1 (SEQ ID NO: 318), OsCS (SEQ ID NO: 322), OsPP2A-2 (SEQ ID NO: 330), and OsCAA90866 (SEQ ID NO: 336). In one embodiment of the disclosed method, the expression of the polypeptide in the cell results in an enhancement of a rate or extent of proliferation of the cell. In another embodiment, the expression of the polypeptide in the cell results in a decrease in a rate or extent of proliferation of the cell.

[0122] In another embodiment of the instant method, the isolated nucleic acid molecule comprises a nucleic acid sequence selected from one of odd numbered SEQ ID NOs: 1-339. In another embodiment, the isolated nucleic acid molecule comprises a nucleic acid sequence selected from one of odd numbered SEQ ID NOs: 1-191.

[0123] Accordingly, it is an object of the presently disclosed subject matter to provide methods and compositions that can be used to enhance agriculturally important plants. This object is achieved in whole or in part by the presently disclosed subject matter.

[0124] An object of the presently disclosed subject matter having been stated above, other objects and advantages will become apparent to those of ordinary skill in the art after a study of the following description of the presently claimed subject matter and non-limiting Examples.

### BRIEF DESCRIPTION OF THE DRAWINGS

[0125] FIGS. 1A-1C are schematic representations of the interactions between various, non-limiting, cell proliferation-related proteins of the presently disclosed subject matter. FIGS. 1A and 1B represent the left and right halves, respectively, of FIG. 1C. Arrows indicate interaction directions between DNA binding domain fused proteins (thick lined boxes or ovals) and activation domain fused proteins. Dotted boxes indicate previously published interactions. Ovals rather than boxes indicate that a protein fused to the DNA binding domain did not interact with other proteins. Circular arrows depict self-interactions. Dotted lines indicate amino acid similarity between proteins. The proteins listed in the Figure can be classified as follows: cell cycle (19758, 20257, 20235, 20462, 20551, 20815, 21003, 21044, 22824, 23136, 23274, 23297, 23367, 23390, 23394, 23484, 23829, 23878, 24091, 24092, 24617, 25692, 25701, 26210, 26317, 26539, 26542, 26603, 26644, 29882, 29941, 29946, 29956, 29958, 29959, 29965, 29966, 31086, and 31182); development (20466, 20533, 20534, 20559, 20689, 20699, 20910, and 31146); biotic stress (20568 and 29050); and abiotic stress (20466, 20554, 20818, 22892, and 23169).

[0126] FIG. 2 is a schematic representation of the interactions between various, non-limiting, cell proliferation-related proteins of the presently disclosed subject matter. Arrows indicate interaction direction between DNA binding domain fused proteins (thick lined boxes or ovals) and activation domain fused proteins. Dotted boxes indicate previously published interactions. Ovals rather than boxes indicate that a protein fused to the DNA binding domain did not interact with other proteins. Circular arrows depict self-interactions. Dotted lines indicate amino acid similarity between proteins. The proteins listed in the Figure can be classified as involved in development with the exception of the following: 19653, 20072 (abiotic stress), 20618 (cell cycle), 23495, 27335, 28517, 29089, 29971 (cell cycle), and 31165. Proteins that can be categorized in multiple categories include 20135 (development and abiotic stress) and 29882 (development and cell cycle).

[0127] FIGS. 3A-3E depicts similarities between various cell proliferation-related proteins of the presently disclosed subject matter.

[0128] FIGS. 3A-3D are a schematic representation showing an amino acid alignment of various, non-limiting, cell proliferation-related proteins of the presently disclosed subject matter.

[0129] FIG. 3E is a schematic representation showing a phylogenetic tree of the proteins for which amino acid sequence alignments are presented in FIGS. 3A-3D.

[0130] FIG. 4 is a schematic representation of the interactions between various, non-limiting, cell proliferation-related proteins of the presently disclosed subject matter. Arrows indicate interaction direction between DNA binding domain fused proteins (thick lined boxes or ovals) and activation domain fused proteins. Dotted boxes indicate previously published interactions. Ovals rather than boxes indicate that a protein fused to the DNA binding domain did not interact with other proteins. Circular arrows depict self-interactions. Dotted lines indicate amino acid similarity between proteins. The proteins listed in the Figure can be classified as follows: biotic stress (20251); abiotic stress (12464, 19902, 22844, 22874, 23059, and 23426); and chloroplast (19842, 22832, 22840, 22844, 22858, 22874, 23059, 23061, 23426, and 30846).

[0131] FIG. 5 is a schematic representation of the interactions between various, non-limiting, cell proliferation-related proteins of the presently disclosed subject matter. Arrows indicate interaction direction between DNA binding domain fused proteins (thick lined boxes or ovals) and activation domain fused proteins. Dotted boxes indicate previously published interactions. Ovals rather than boxes indicate that a protein fused to the DNA binding domain did not interact with other proteins. Circular arrows depict self-interactions. Dotted lines indicate amino acid similarity between proteins. The proteins listed in the Figure can be classified as follows: development (glutamyl amino peptidase); biotic stress (19651, 20899, and 22823); abiotic stress (20775, 29077, 29098, 29086, and 29113).

[0132] FIG. 6 is a schematic representation of the interactions between various, non-limiting, cell proliferation-related proteins of the presently disclosed subject matter. Arrows indicate interaction direction between DNA binding domain fused proteins (thick lined boxes or ovals) and activation domain fused proteins. Dotted boxes indicate previously published interactions. Ovals rather than boxes indicate that a protein fused to the DNA binding domain did not interact with other proteins. Circular arrows depict self-interactions. Dotted lines indicate amino acid similarity between proteins. The proteins listed in the Figure can be classified as follows: biotic stress (ORF020300-2233.2, 23268, 011994-D16, and OsPP2-A) and abiotic stress (23225, OsCAA90866, and 3209-OS208938).

### BRIEF DESCRIPTION OF THE SEQUENCE LISTING

[0133] SEQ ID NOs: 1-340 present nucleic acid and amino acid sequences of the rice (Oryza sativa) polypeptides employed in the two hybrid assays disclosed hereinbelow. For these SEQ ID NOs., the odd numbered sequences are nucleic acid sequences, and the even numbered sequences are the deduced amino acid sequences of the nucleic acid sequence of the immediately preceding SEQ ID NO:. For example, SEQ ID NO: 2 is the deduced amino acid sequence of the nucleic acid sequence presented in SEQ ID NO: 1, SEQ ID NO: 4 is the deduced amino acid sequence of the nucleic acid sequence presented in SEQ ID NO: 3, SEQ ID NO: 6 is the deduced amino acid sequence of the nucleic acid sequence presented in SEQ ID NO: 5, etc. Further description of the SEQ ID NOs. is presented in the following Table:

| SEQ ID | PN | |
|---|---|---|
| NOs. | Number | Description |
| 1, 2 | 21044 | Hypothetical Protein 018989-4003, Similar to Triticum sp. DP Protein |
| 3, 4 | 26539 | Novel Protein PN26539(AC087544), Probable DP |
| 5, 6 | 29946 | Novel Protein PN29946, Similar to A. thaliana Kinesin-Like Protein |
| | | (GENBANK ® Accession No. BAB11329.1; e = 0.0) |
| 7, 8 | 30852 | Novel Protein PN30852 |
| 9, 10 | 21003 | O. sativa E2F2 Homolog |
| | | (GENBANK ® Accession Nos. AB041726; BAB20933) |
| 11, 12 | 22824 | Novel Protein PN22824, Myosin heavy chain |
| 13, 14 | 31182 | Novel Protein PN31183, A. thaliana DP-Like Protein |
| | | (GENBANK ® Accession No. CAC15483.1; 9e⁻⁵⁵) |
| 15, 16 | 23484 | Novel Protein PN23484, heavy meromyosin |
| 17, 18 | 29942 | Novel Protein PN29942, Fragment, zinc finger protein |
| 19, 20 | 29957 | Novel Protein PN29957, Fragment, unknown |
| 21, 22 | 30848 | Novel Protein PN30848, Fragment, RNA binding protein |
| 23, 24 | 30899 | Hypothetical Protein 000221-3976, Fragment, Similar to |
| | | OsHP82 (GENBANK ® Accession No. P33126; e = 0.0) |
| 25, 26 | 29970 | Putative CorA-like Mg²⁺ Transporter Protein |
| 27, 28 | 20815 | Hypothetical Protein PN20815 Similar to A. thaliana |
| | | Myosin Heavy Chain, Fragment |
| 29, 30 | 23274 | Novel Protein PN23274, Similar to A. thaliana ARM |
| | | Repeat-Containing Protein |
| 31, 32 | 23390 | Novel Protein PN23390, Putative Kinesin-like |
| | | Calmodulin Binding Protein, Fragment |
| 33, 34 | 26688 | Novel Protein PN26688, unknown |
| 35, 36 | 29882 | Novel Protein PN29882, Fragment, myosin heavy chain |
| 37, 38 | 29956 | Novel Protein PN29956, Fragment, nuclear matrix constituent |
| 39, 40 | 29958 | Novel Protein PN29958, Fragment, centromere homologue |
| 41, 42 | 29961 | Novel Protein PN29961, Fragment, Similar to A. thaliana |
| | | Unknown Protein |
| | | (GENBANK ® Accession No. BAB02349) |
| 43, 44 | 29965 | Novel Protein PN29965, Fragment, Similar to A. thaliana |
| | | Kinesin (Centromere Protein)-Like Heavy Chain-Like Protein |
| | | (GENBANK ® Accession No. BAB03114) |
| 45, 46 | 29966 | Novel Protein PN29966, Fragment, myosin heavy chain |
| 47, 48 | 29967 | Novel Protein PN29967, Fragment, unknown |
| 49, 50 | 29968 | Novel Protein PN29968, Similar to A. thaliana Unknown |
| | | Protein (GENBANK ® Accession No. BAB01990) |
| 51, 52 | 29969 | Novel Protein PN29969, Similar to A. thaliana Unknown |
| | | Protein (GENBANK ® Accession No. BAB01990) |
| 53, 54 | 30854 | Novel Protein PN30854, unknown |
| 55, 56 | 23495 | Novel protein PN23495 |
| 57, 58 | 22834 | Novel protein PN22834, similar to Oshox6, fragment |
| 59, 60 | 29949 | Novel protein PN29949 putative MADS protein |
| 61, 62 | 31165 | Novel protein PN31165 |
| 63, 64 | 20072 | Hypothetical protein 000564-1102 |
| 65, 66 | 29971 | Novel protein PN29971, fragment, similar to A. thaliana |
| | | centromere protein |
| | | (GENBANK ® Accession No. NP_191066) |
| 67, 68 | 23169 | Hypothetical Protein 000221-3976, Fragment, Similar to |
| | | OsHP82 (GENBANK ® Accession No. P33126; e = 0.0) |
| 69, 70 | 23251 | Novel Protein PN23251 |
| 71, 72 | 23388 | Novel Protein PN23388 |
| 73, 74 | 23829 | Novel Protein PN23829 Putative S-Adenosyl-L- |
| | | Homocysteine Hydrolase |
| | | (GENBANK ® Accession No. P32112; e = 0.0) |
| 75, 76 | 23830 | Novel Protein PN23830, Similar to A. thaliana Putative |
| | | PHD-Finger Protein |
| | | (GENBANK ® Accession No. NP_566742.1; 2e⁻⁷³) |
| 77, 78 | 24092 | Novel Protein PN24092, Similar to O. sativa Putative Myosin |
| 79, 80 | 30858 | Novel Protein PN30858 |
| 81, 82 | 21036 | Hypothetical Protein 003181-3684 |
| 83, 84 | 22858 | Novel Protein 22858, Fragment, similar to Arabidopsis |
| | | GTP Cyclohydrolase II |
| | | (GENBANK ® Accession No. BAB09512.1; e = 0) |
| 85, 86 | 22874 | Novel Protein 22874, Fragment, similar to Arabidopsis |
| | | Putative Phosphatidylinositol-4-phosphate 5-kinase |
| | | (GENBANK ® Accession No. NP_187603.1; 4e⁻¹⁸) |
| 87, 88 | 22866 | Novel Protein PN22866, Fragment, Similar to |
| | | A. Thaliana Vacuolar ATP Synthase Subunit C (V- |
| | | ATPase C subunit; Vacuolar proton pump C subunit) |
| | | (GENBANK ® Accession No. Q9SDS7; e⁻¹⁵²) |
| 89, 90 | 23022 | Novel Protein PN23022, Fragment, similar to H. Vulgare |
| | | Plasma Membrane H⁺-ATPase |
| | | (GENBANK ® Accession No. CAC50884; e = 0.0) |
| 91, 92 | 23061 | Hypothetical Protein OsContig3864, Similar to H. vulgare |
| | | Photosystem I Reaction Center Subunit II, |
| | | Chloroplast Precursor |
| | | (GENBANK ® Accession No. P36213; 6e⁻⁸⁷) |
| 93, 94 | 29982 | Novel Protein PN29982 |
| 95, 96 | 30846 | Novel Protein PN30846 |
| 97, 98 | 30974 | Novel Protein PN30974 |
| 99, 100 | 23053 | Novel Protein 23053, Fragment, Similar to Arabidopsis |
| | | Putative Na+-Dependent Inorganic Phosphate Cotransporter |
| | | (GENBANK ® Accession No. NP_181341.1; e⁻¹⁰⁵) |
| 101, 102 | 23226 | Novel Protein PN23226, Callose synthase |
| 103, 104 | 23485 | Novel Protein PN23485, Similar to Hordeum vulgare |
| | | Coproporphyrinogen III Oxidase, chloroplast precursor |
| | | (GENBANK ® Accession No. Q42840; e⁻¹⁶⁹) |
| 105, 106 | 29037 | Novel Protein PN29037 |
| 107, 108 | 29950 | Novel Protein PN29950 |
| 109, 110 | 20551 | Hypothetical Protein 003118-3674 Similar to |
| | | Lycopersicon esculentum Calmodulin |
| 111, 112 | 24060 | L-aspartase-like protein-like |
| 113, 114 | 23914 | RNA binding domain protein |
| 115, 116 | 23221 | Proline rich protein |
| 117, 118 | 24061 | Auxin induced protein-like |
| 119, 120 | 23949 | HSP70-like |
| 121, 122 | 29042 | Fibrillin-like |
| 123, 124 | 28982 | Archain delta COP-like |
| 125, 126 | 29984 | Novel Protein PN29950 |
| 127, 128 | 30844 | Novel protein PN30844 |
| 129, 130 | 30868 | NAD(P) binding domain protein |
| 131, 132 | 24292 | Gamma adaptin-like |
| 133, 134 | 29983 | Novel protein PN29983 |
| 135, 136 | 30845 | Pectinesterase-like |
| 137, 138 | 31085 | Receptor-like protein kinase-like |
| 139, 140 | 20674 | Pyruvate orthophosphate dikinase-like |
| 141, 142 | 30870 | Isp-4 like |
| 143, 144 | 29997 | Xanthine dehydrogenase-like |
| 145, 146 | 30843 | Ubiquitin specific protease-like |
| 147, 148 | 30857 | Novel protein PN30857 |
| 149, 150 | 20115 | Ring zinc finger protein |
| 151, 152 | 22823 | Novel Protein PN22823, Similar to ABC Transporter |
| | | Proteins (GENBANK ® Accession Nos. T02187, |
| | | AB043999.1, NP_171753; e = 0) |
| 153, 154 | 22154 | Novel Protein PN22154, Similar to A. thaliana Glutamyl Aminopeptidase |
| | | (GENBANK ® Accession No. AL035525; e = 0) |
| 155, 156 | 29041 | Novel Protein PN29041, Fragment, Similar to A. thaliana |
| | | Putative ATPase |
| | | (GENBANK ® Accession No. AAG52137; e⁻¹⁷) |
| 157, 158 | 22020 | Novel Protein PN22020, Fragment, Similar to A. thaliana |
| | | Putative Protein |
| | | (GENBANK ® Accession No. NP_197783; 3e⁻³⁴) |
| 159, 160 | 22825 | Novel Protein PN22825, Fragment |
| 161, 162 | 29076 | Novel Protein PN29076, Fragment |
| 163, 164 | 29077 | Novel Protein PN29077, Fragment, Similar to A. thaliana |
| | | DNA-Damage Inducible Protein DDI1-Like |
| | | (GENBANK ® Accession No. BAB02792; 5e⁻⁹⁴) |
| 165, 166 | 29084 | Novel Protein PN29084, Fragment, Similar to Soybean |
| | | (Glycine max) Calcium-Dependent Protein Kinase |
| | | (GENBANK ® Accession No. A43713, 2e⁻⁷⁹) |
| 167, 168 | 29115 | Novel Protein PN29115, Fragment, Similar to A. thaliana |
| | | 6,7-Dimethyl-8-Ribityllumazine Synthase Precursor |
| | | (GENBANK ® Accession No. AAK93590, 6e⁻³⁷) |
| 169, 170 | 29116 | Novel Protein PN29116, Fragment |
| 171, 172 | 29117 | Novel Protein PN29117 |
| 173, 174 | 29118 | Novel Protein PN29118, Fragment |
| 175, 176 | 29119 | Novel Protein PN29119, Fragment |
| 177, 178 | 21639 | Hypothetical Protein ORF020300-2233.2, Putative |
| | | PP2A Regulatory Subunit, Similar to |
| | | OsCAA90866(AAD39930; 5e⁻⁹²) |
| | | (GENBANK ® Accession No. CAA90866; 5e⁻⁵³) |
| 179, 180 | 23268 | Novel Protein 23268, Similar to |
| | | Phosphoribosylanthranilate Transferase, Chloroplast |
| | | Precursor, Fragment |
| | | (GENBANK ® Accession No. AAB02913.1; 5e⁻⁹⁵) |
| 181, 182 | 26645 | Novel Protein PN26645, Putative Protein Disulfide |
| | | Isomerase-Related Protein Precursor |
| | | (GENBANK ® Accession No. BAB09470.1; e⁻²⁸) |
| 183, 184 | 24162 | Novel Protein PN24162, Porin-like, Voltage-Dependent |
| | | Anion Channel Protein |
| | | (GENBANK ® Accession No. NP_201551; 3e⁻⁸⁶) |
| 185, 186 | 20618 | Hypothetical Protein 011994-D16, Similar to Z. mays DnaJ protein |
| | | (GENBANK ® Accession No. T01643; e = 0) |
| 187, 188 | 23045 | Novel Protein PN23045 |
| 189, 190 | 23225 | Novel Protein PN23225, Similar to Tritticum aestivum |
| | | Initiation Factor (iso)4f p82 Subunit |
| | | (GENBANK ® Accession No. AAA74724; e = 0) |
| 191, 192 | 29883 | Novel Protein PN29883, Fragment |
| 193, 194 | 19758 | O. sativa E2F Homolog |
| | | (GENBANK ® Accession Nos. AB041725; BAB20932) |
| 195, 196 | 23367 | O. sativa Kinesin-like Protein |
| | | (GENBANK ® Accession Nos. AC068924; AAG13527.1) |
| 197, 198 | 26317 | O. sativa Putative Myosin Heavy Chain |
| | | (GENBANK ® Accession Nos. AC091123; AAK72891) |
| 199, 200 | 20910 | O. sativa MADS Box Protein MADS14 |
| | | (GENBANK ® Accession Nos. AF058697, AAF19047) |
| 201, 202 | 20231 | O. sativa MADS Box Protein MADS45 |
| | | (GENBANK ® Accession Nos. U31994, AAB50180) |
| 203, 204 | 19695 | O. sativa Small GTP-Binding Protein RACDP |
| | | (GENBANK ® Accession Nos. AF218381; AAF28764) |
| 205, 206 | 20325 | O. sativa Cyclin OsS49462, Fragment (X82035) |
| 207, 208 | 25358 | Hypothetical Protein |
| | | (GENBANK ® Accession No. AAK39589) |
| 209, 210 | 20257 | O. sativa Cyclin OsCYCOS2 |
| | | (GENBANK ® Accession No. X82036) |
| 211, 212 | 23363 | O. sativa Hypothetical Protein 13324791 |
| 213, 214 | 26210 | O. sativa Putative CCAAT Displacement Protein |
| 215, 216 | 23297 | O. sativa Putative Myosin Heavy Chain |
| 217, 218 | 23416 | Chloroplast ATPase I Subunit |
| 219, 220 | 23136 | Hypothetical Protein BAA85200 Similar to Syntaxin |
| | | Related Protein AtVam3p |
| 221, 222 | 25381 | Protein 13357265 Putative CorA-like Mg²⁺ Transporter Protein |
| 223, 224 | 20847 | O. sativa OS008339 MADS box transcription factor, fragment |
| | | (GENBANK ® Accession No. AJ293816) |
| 225, 226 | 19766 | O. sativa MADS-box protein FDRMADS6 |
| | | (GENBANK ® Accession Nos. AF139664, AAF66997) |
| 227, 228 | 20698 | O. sativa MADS-box protein FDRMADS8 |
| | | (GENBANK ® Accession Nos. AF141965, AAD38369) |
| 229, 230 | 19788 | O. sativa MADS box protein MADS1 |
| | | (GENBANK ® Accession Nos. AF204063, AAG35652) |
| 231, 232 | 20700 | O. sativa MADS box protein MADS3 |
| | | (GENBANK ® Accession Nos. L37528, AAA99964) |
| 233, 234 | 20770 | O. sativa MADS box protein MADS5 |
| | | (GENBANK ® Accession Nos. U78890, AAB71434) |
| 235, 236 | 20233 | O. sativa MADS box protein MADS6 |
| | | (GENBANK ® Accession Nos. U78782, AAB64250) |
| 237, 238 | 20668 | O. sativa MADS box protein MADS13 |
| | | (GENBANK ® Accession Nos. AF151693, AAF13594) |
| 239, 240 | 20842 | O. sativa MADS box protein MADS15 |
| | | (GENBANK ® Accession Nos. AF058698, AAF19048) |
| 241, 242 | 20912 | O. sativa MADS box protein MADS18 |
| | | (GENBANK ® Accession Nos. AF091458, AAF04972) |
| 243, 244 | 20232 | O. sativa AP1-like MADS box protein RAP1B |
| | | (GENBANK ® Accession Nos. AB041020, BAA94342) |
| 245, 246 | 20837 | O. sativa MADS box-like protein |
| | | (GENBANK ® Accession Nos. AB003322, BAA81880) |
| 247, 248 | 21116 | O. sativa MADS box protein MADS7 |
| | | (GENBANK ® Accession Nos. U78891, AAC49816) |
| 249, 250 | 20778 | O. sativa MADS box protein MADS8 |
| | | (GENBANK ® Accession Nos. U78892, AAC49817) |
| 251, 252 | 20914 | O. sativa MADS box transcription factor MADS17 |
| | | (GENBANK ® Accession Nos. AF109153, AAF21900) |
| 253, 254 | 19877 | O. sativa Prolamin |
| | | (GENBANK ® Accession Nos. AF156714, AAF73991) |
| 255, 256 | 28517 | O. sativa Hypothetical protein BAB56078 (AP003106, BAB56078) |
| 257, 258 | 20559 | O. sativa Homeobox Protein HOS59, Fragment |
| | | (GENBANK ® Accession No. BAB55659.1) |
| 259, 260 | 22896 | O. sativa Hypothetical Protein, Similar to GTPase Activating Protein |
| | | (GENBANK ® Accession Nos. AF111710; AAD27557) |
| 261, 262 | 25701 | O. sativa Putative Myosin |
| | | (GENBANK ® Accession Nos. AC078840; AAG13633) |
| 263, 264 | 23253 | O. sativa Putative Homeodomain Protein OsAAK00972 |
| | | (GENBANK ® Accession Nos. AC079736; AAK00972.1) |
| 265, 266 | 23832 | O. sativa Putative Eukaryotic Translation Initiation Factor 3 Large Subunit |
| | | (GENBANK ® Accession Nos. AP002487; BAB07943.1) |
| 267, 268 | 20689 | O. sativa Probable Myb Factor |
| | | (GENBANK ® Accession No. T03830) |
| 269, 270 | 20466 | O. sativa bZIP Transcription Factor |
| | | (GENBANK ® Accession Nos. AB051294; BAB72061.1) |
| 271, 272 | 19697 | O. sativa Putative Transcription Factor X1 |
| | | (GENBANK ® Accession Nos. AF101045; AAF21887) |
| 273, 274 | 20080 | Hypothetical Protein 005792-3529 Similar to O. sativa Receptor Kinase |
| | | (GENBANK ® Accession Nos. AAK18840.1; 8e⁻⁰⁷) |
| 275, 276 | 20534 | Hypothetical Protein 018049-3655, Fragment, O. sativa |
| | | Putative Homeodomain Transcription Factor, 3′-Partial |
| | | (GENBANK ® Accession Nos. AC092697; AAL58126.1) |
| 277, 278 | 12464 | O. sativa 14-3-3 Protein Homolog GF14-c |
| | | (GENBANK ® Accession No. U65957) |
| 279, 280 | 22844 | O. sativa 3-Phosphoshikimate 1-carboxyvinyltransferase |
| | | (EPSP Synthase) |
| | | (GENBANK ® Accession Nos. AB052962; BAB61062.1) |
| 281, 282 | 22832 | O. sativa Fructose-Bisphosphate Aldolase, Chloroplast |
| | | Precursor (GENBANK ® Accession No. Q40677) |
| 283, 284 | 23426 | O. sativa Chloroplast Ribulose Bisphosphate |
| | | Carboxylase, Large Chain |
| | | (GENBANK ® Accession Nos. D00207; P12089) |
| 285, 286 | 19842 | O. sativa Ribulose Bisphosphate |
| | | Carboxylase/Oxygenase Activase, Large Isoform A1 |
| | | (GENBANK ® Accession Nos. AB034698, BAA97583) |
| 287, 288 | 23059 | OsContig4331, O. sativa Putative 33 kDa Oxygen- |
| | | Evolving Protein of Photosystem II |
| | | (GENBANK ® Accession No. BAB64069) |
| 289, 290 | 22840 | O. sativa Photosystem II 10 kDa Polypeptide |
| | | (GENBANK ® Accession Nos. U86018; T04177) |
| 291, 292 | 20251 | O. sativa Defender Against Apoptotic Death 1 |
| | | (GENBANK ® Accession Nos. D89727; BAA24104) |
| 293, 294 | 19902 | Beta-Expansin EXPB2 |
| | | (GENBANK ® Accession Nos. U95968; AAB61710) |
| 295, 296 | 20462 | Hypothetical Protein 006819-2510, Similar to |
| | | Senescence-Related Protein 5 from Hemerocallis Hybrid Cultivar |
| | | (GENBANK ® Accession No. AAC34855.1; e⁻⁹⁷) |
| 297, 298 | 24059 | O. sativa Histone Deacetylase HD1 |
| | | (GENBANK ® Accession Nos. AF332875; AAK01712.1) |
| 299, 300 | 20544 | O. sativa Calreticulin Precursor |
| | | (GENBANK ® Accession Nos. AB021259; BAA88900) |
| 301, 302 | 22883 | Oryza sativa Low Temperature-Induced Protein 5 |
| | | (GENBANK ® Accession Nos. AB011368; BAA24979.1) |
| 303, 304 | 23878 | Oryza sativa Putative Myosin |
| | | (GENBANK ® Accession Nos. AC090120; AAL31066.1) |
| 305, 306 | 20554 | O. sativa DEHYDRIN RAB 16B |
| | | (GENBANK ® Accession No. P22911) |
| 307, 308 | 19701 | Soluble Starch Synthase |
| | | (GENBANK ® Accession Nos. AF165890; AAD49850) |
| 309, 310 | 20285 | OsSGT1 (GENBANK ® Accession No. gi\|6581058) |
| 311, 312 | 20696 | Elicitor responsive protein |
| | | (GENBANK ® Accession No. gi\|11358958) |
| 313, 314 | 24063 | RAS GTPase (GENBANK ® Accession No. gi\|730510) |
| 315, 316 | 20621 | Shaggy kinase |
| | | (GENBANK ® Accession No. gi\|13677093) |
| 317, 318 | 19651 | O. sativa Chitinase, Class III |
| | | (GENBANK ® Accession Nos. AF296279; AAG02504) |
| 319, 320 | 20899 | O. sativa Catalase A Isozyme |
| | | (GENBANK ® Accession Nos. D29966; BAA06232) |
| 321, 322 | 19707 | O. sativa Cellulose Synthase Catalytic Subunit, RSW1-Like |
| | | (GENBANK ® Accession Nos. AF030052; AAC39333) |
| 323, 324 | 29086 | O. sativa salT Gene Product |
| | | (GENBANK ® Accession Nos. AF001395; AAB53810.1) |
| 325, 326 | 29098 | O. sativa Aquaporin |
| | | (GENBANK ® Accession No. AF062393) |
| 327, 328 | 29113 | O. sativa DNAJ Homologue |
| | | (GENBANK ® Accession No. BAB70509.1) |
| 329, 330 | 20254 | O. sativa Serine/Threonine Protein Phosphatase PP2A-2, Catalytic Subunit |
| | | (GENBANK ® Accession Nos. AF134552, AAD22116) |
| 331, 332 | 23266 | O. sativa Putative Proline-Rich Protein AAK63900 |
| | | (GENBANK ® Accession No. AC084884) |
| 333, 334 | 24775 | O. sativa Glutelin CAA33838 |
| | | (GENBANK ® Accession No. X15833) |
| 335, 336 | 20311 | O. sativa Chilling-Inducible Protein CAA90866 |
| | | (GENBANK ® Accession Nos. Z54153, CAA90866) |
| 337, 338 | 20215 | O. sativa Putative 14-3-3 Protein |
| | | (GENBANK ® Accession No. AAK38492) |
| 339, 340 | 23186 | O. sativa Putative Pyrrolidone Carboxyl Peptidase |
| | | (GENBANK ® Accession No. AAG46136) |
| 341, 342 | 25962 | putative protein kinase |
| | | (GENBANK ® Accession Nos: AC082645., AK18843) |
| 343, 344 | 27024 | Rice hypothetical protein |
| | | (GENBANK ® Accession Nos. AP000615, BAA85416) |
| 345, 346 | 20775 | Rice Hsp70 |
| | | (GENBANK ® Accession Nos. X67711, CAA47948) |

[0134] SEQ ID NO: 347 is a consensus sequence derived from the alignment depicted in FIGS. 3A-3D.

[0135] SEQ ID NO: 348 is an amino acid sequence of clone PN20278, as shown in FIGS. 3A-3D.

[0136] SEQ ID NO: 349 is an amino acid sequence of clone PN29949b, as shown in FIGS. 3A-3D.

### DETAILED DESCRIPTION

[0137] The presently disclosed subject matter will be now be described more fully hereinafter with reference to the accompanying Examples, in which representative embodiments of the presently disclosed subject matter are shown. The presently disclosed subject matter can, however, be embodied in different forms and should not be construed as limited to the embodiments set forth herein. Rather, these embodiments are provided so that this disclosure will be thorough and complete, and will fully convey the scope of the presently disclosed subject matter to those skilled in the art.

[0138] All of the patents (including published patent applications) and publications (including GENBANK® sequence references), which are cited herein, are hereby incorporated by reference in their entireties to the same extent as if each were specifically stated to be incorporated by reference. Any inconsistency between these patents and publications and the present disclosure shall be resolved in favor of the present disclosure.

I. General Considerations

[0139] A goal of functional genomics is to identify genes controlling expression of organismal phenotypes, and functional genomics employs a variety of methodologies including, but not limited to, bioinformatics, gene expression studies, gene and gene product interactions, genetics, biochemistry, and molecular genetics. For example, bioinformatics can assign function to a given gene by identifying genes in heterologous organisms with a high degree of similarity (homology) at the amino acid or nucleotide level. Studies of the expression of a gene at the mRNA or polypeptide levels can assign function by linking expression of the gene to an environmental response, a developmental process, or a genetic (mutational) or molecular genetic (gene overexpression or underexpression) perturbation. Expression of a gene at the mRNA level can be ascertained either alone (for example, by Northern analysis) or in concert with other genes (for example, by microarray analysis), whereas expression of a gene at the polypeptide level can be ascertained either alone (for example, by native or denatured polypeptide gel or immunoblot analysis) or in concert with other genes (for example, by proteomic analysis). Knowledge of polypeptide/polypeptide and polypeptide/DNA interactions can assign function by identifying polypeptides and nucleic acid sequences acting together in the same biological process. Genetics can assign function to a gene by demonstrating that DNA lesions (mutations) in the gene have a quantifiable effect on the organism, including, but not limited to, its development; hormone biosynthesis and response; growth and growth habit (plant architecture); mRNA expression profiles; polypeptide expression profiles; ability to resist diseases; tolerance of abiotic stresses (for example, drought conditions); ability to acquire nutrients; photosynthetic efficiency; altered primary and secondary metabolism; and the composition of various plant organs. Biochemistry can assign function by demonstrating that the polypeptide(s) encoded by the gene, typically when expressed in a heterologous organism, possesses a certain enzymatic activity, either alone or in combination with other polypeptides. Molecular genetics can assign function by overexpressing or underexpressing the gene in the native plant or in heterologous organisms, and observing quantifiable effects as disclosed in functional assignment by genetics above. In functional genomics, any or all of these approaches are utilized, often in concert, to assign functions to genes across any of a number of organismal phenotypes.

[0140] It is recognized by those skilled in the art that these different methodologies can each provide data as evidence for the function of a particular gene, and that such evidence is stronger with increasing amounts of data used for functional assignment: in one embodiment from a single methodology, in another embodiment from two methodologies, and in still another embodiment from more than two methodologies. In addition, those skilled in the art are aware that different methodologies can differ in the strength of the evidence provided for the assignment of gene function. Typically, but not always, a datum of biochemical, genetic, or molecular genetic evidence is considered stronger than a datum of bioinformatic or gene expression evidence. Finally, those skilled in the art recognize that, for different genes, a single datum from a single methodology can differ in terms of the strength of the evidence provided by each distinct datum for the assignment of the function of these different genes.

[0141] The objective of crop trait functional genomics is to identify crop trait genes of interest, for example, genes capable of conferring useful agronomic traits in crop plants. Such agronomic traits include, but are not limited to, enhanced yield, whether in quantity or quality; enhanced nutrient acquisition and metabolic efficiency; enhanced or altered nutrient composition of plant tissues used for food, feed, fiber, or processing; enhanced utility for agricultural or industrial processing; enhanced resistance to plant diseases; enhanced tolerance of adverse environmental conditions (abiotic stresses) including, but not limited to, drought, excessive cold, excessive heat, or excessive soil salinity or extreme acidity or alkalinity; and alterations in plant architecture or development, including changes in developmental timing. The deployment of such identified trait genes by either transgenic or non-transgenic means can materially improve crop plants for the benefit of agriculture.

[0142] Cereals are the most important crop plants on the planet in terms of both human and animal consumption. Genomic synteny (conservation of gene order within large chromosomal segments) is observed in rice, maize, wheat, barley, rye, oats, and other agriculturally important monocots, which facilitates the mapping and isolation of orthologous genes from diverse cereal species based on the sequence of a single cereal gene. Rice has the smallest (about 420 Mb) genome among the cereal grains, and has recently been a major focus of public and private genomic and EST sequencing efforts. See Goff et al., 2002.

II. Definitions

[0143] Unless otherwise defined, all technical and scientific terms used herein have the same meaning as commonly understood by one of ordinary skill in the art to which the presently disclosed subject matter pertains. For clarity of the present specification, certain definitions are presented hereinbelow.

[0144] Following long-standing patent law convention, the terms “a” and “an” mean “one or more” when used in this application, including in the claims.

[0145] As used herein, the term “about”, when referring to a value or to an amount of mass, weight, time, volume, concentration or percentage is meant to encompass variations of ±20% or ±10%, in another example ±5%, in another example ±1%, and in still another example ±0.1% from the specified amount, as such variations are appropriate to practice the presently disclosed subject matter. Unless otherwise indicated, all numbers expressing quantities of ingredients, reaction conditions, and so forth used in the specification and claims are to be understood as being modified in all instances by the term “about”. Accordingly, unless indicated to the contrary, the numerical parameters set forth in this specification and attached claims are approximations that can vary depending upon the desired properties sought to be obtained by the presently disclosed subject matter.

[0146] As used herein, the terms “amino acid” and “amino acid residue” are used interchangeably and refer to any of the twenty naturally occurring amino acids, as well as analogs, derivatives, and congeners thereof; amino acid analogs having variant side chains; and all stereoisomers of any of any of the foregoing. Thus, the term “amino acid” is intended to embrace all molecules, whether natural or synthetic, which include both an amino functionality and an acid functionality and capable of being included in a polymer of naturally occurring amino acids.

[0147] An amino acid is formed upon chemical digestion (hydrolysis) of a polypeptide at its peptide linkages. The amino acid residues described herein are in one embodiment in the “L” isomeric form. However, residues in the “D” isomeric form can be substituted for any L-amino acid residue, as long as the desired functional property is retained by the polypeptide. NH₂ refers to the free amino group present at the amino terminus of a polypeptide. COOH refers to the free carboxy group present at the carboxy terminus of a polypeptide. In keeping with standard polypeptide nomenclature abbreviations for amino acid residues are shown in tabular form presented hereinabove.

[0148] It is noted that all amino acid residue sequences represented herein by formulae have a left-to-right orientation in the conventional direction of amino terminus to carboxy terminus. In addition, the phrases “amino acid” and “amino acid residue” are broadly defined to include modified and unusual amino acids.

[0149] Furthermore, it is noted that a dash at the beginning or end of an amino acid residue sequence indicates a peptide bond to a further sequence of one or more amino acid residues or a covalent bond to an amino-terminal group such as NH₂ or acetyl or to a carboxy-terminal group such as COOH.

[0150] As used herein, the terms “associated with” and “operatively linked” refer to two nucleic acid sequences that are related physically or functionally. For example, a promoter or regulatory DNA sequence is said to be “associated with” a DNA sequence that encodes an RNA or a polypeptide if the two sequences are operatively linked, or situated such that the regulator DNA sequence will affect the expression level of the coding or structural DNA sequence.

[0151] As used herein, the term “chimera” refers to a polypeptide that comprises domains or other features that are derived from different polypeptides or are in a position relative to each other that is not naturally occurring.

[0152] As used herein, the term “chimeric construct” refers to a recombinant nucleic acid molecule in which a promoter or regulatory nucleic acid sequence is operatively linked to, or associated with, a nucleic acid sequence that codes for an mRNA or which is expressed as a polypeptide, such that the regulatory nucleic acid sequence is able to regulate transcription or expression of the associated nucleic acid sequence. The regulatory nucleic acid sequence of the chimeric construct is not normally operatively linked to the associated nucleic acid sequence as found in nature.

[0153] As used herein, the term “co-factor” refers to a natural reactant, such as an organic molecule or a metal ion, required in an enzyme-catalyzed reaction. A co-factor can be, for example, NAD(P), riboflavin (including FAD and FMN), folate, molybdopterin, thiamin, biotin, lipoic acid, pantothenic acid and coenzyme A, S-adenosylmethionine, pyridoxal phosphate, ubiquinone, and menaquinone. In one embodiment, a co-factor can be regenerated and reused.

[0154] As used herein, the terms “coding sequence” and “open reading frame” (ORF) are used interchangeably and refer to a nucleic acid sequence that is transcribed into RNA such as mRNA, rRNA, tRNA, snRNA, sense RNA, or antisense RNA. In one embodiment, the RNA is then translated in vivo or in vitro to produce a polypeptide.

[0155] As used herein, the term “complementary” refers to two nucleotide sequences that comprise antiparallel nucleotide sequences capable of pairing with one another upon formation of hydrogen bonds between the complementary base residues in the antiparallel nucleotide sequences. As is known in the art, the nucleic acid sequences of two complementary strands are the reverse complement of each other when each is viewed in the 5′ to 3′ direction.

[0156] As is also known in the art, two sequences that hybridize to each other under a given set of conditions do not necessarily have to be 100% fully complementary. As used herein, the terms “fully complementary” and “100% complementary” refer to sequences for which the complementary regions are 100% in Watson-Crick base-pairing, i.e., that no mismatches occur within the complementary regions. However, as is often the case with recombinant molecules (for example, cDNAs) that are cloned into cloning vectors, certain of these molecules can have non-complementary overhangs on either the 5′ or 3′ ends that result from the cloning event. In such a situation, it is understood that the region of 100% or full complementarity excludes any sequences that are added to the recombinant molecule (typically at the ends) solely as a result of, or to facilitate, the cloning event. Such sequences are, for example, polylinker sequences, linkers with restriction enzyme recognition sites, etc.

[0157] As used herein, the terms “domain” and “feature”, when used in reference to a polypeptide or amino acid sequence, refers to a subsequence of an amino acid sequence that has a particular biological function. Domains and features that have a particular biological function include, but are not limited to, ligand binding, nucleic acid binding, catalytic activity, substrate binding, and polypeptide-polypeptide interacting domains. Similarly, when used herein in reference to a nucleic acid sequence, a “domain”, or “feature” is that subsequence of the nucleic acid sequence that encodes a domain or feature of a polypeptide.

[0158] As used herein, the term “enzyme activity” refers to the ability of an enzyme to catalyze the conversion of a substrate into a product. A substrate for the enzyme can comprise the natural substrate of the enzyme but also can comprise analogues of the natural substrate, which can also be converted by the enzyme into a product or into an analogue of a product. The activity of the enzyme is measured for example by determining the amount of product in the reaction after a certain period of time, or by determining the amount of substrate remaining in the reaction mixture after a certain period of time. The activity of the enzyme can also be measured by determining the amount of an unused co-factor of the reaction remaining in the reaction mixture after a certain period of time or by determining the amount of used co-factor in the reaction mixture after a certain period of time. The activity of the enzyme can also be measured by determining the amount of a donor of free energy or energy-rich molecule (e.g., ATP, phosphoenolpyruvate, acetyl phosphate, or phosphocreatine) remaining in the reaction mixture after a certain period of time or by determining the amount of a used donor of free energy or energy-rich molecule (e.g., ADP, pyruvate, acetate, or creatine) in the reaction mixture after a certain period of time.

[0159] As used herein, the term “expression cassette” refers to a nucleic acid molecule capable of directing expression of a particular nucleotide sequence in an appropriate host cell, comprising a promoter operatively linked to the nucleotide sequence of interest which is operatively linked to termination signals. It also typically comprises sequences required for proper translation of the nucleotide sequence. The coding region usually encodes a polypeptide of interest but can also encode a functional RNA of interest, for example antisense RNA or a non-translated RNA, in the sense or antisense direction. The expression cassette comprising the nucleotide sequence of interest can be chimeric, meaning that at least one of its components is heterologous with respect to at least one of its other components. The expression cassette can also be one that is naturally occurring but has been obtained in a recombinant form useful for heterologous expression. Typically, however, the expression cassette is heterologous with respect to the host; i.e., the particular DNA sequence of the expression cassette does not occur naturally in the host cell and was introduced into the host cell or an ancestor of the host cell by a transformation event. The expression of the nucleotide sequence in the expression cassette can be under the control of a constitutive promoter or of an inducible promoter that initiates transcription only when the host cell is exposed to some particular external stimulus. In the case of a multicellular organism such as a plant, the promoter can also be specific to a particular tissue, organ, or stage of development.

[0160] As used herein, the term “fragment” refers to a sequence that comprises a subset of another sequence. When used in the context of a nucleic acid or amino acid sequence, the terms “fragment” and “subsequence” are used interchangeably. A fragment of a nucleic acid sequence can be any number of nucleotides that is less than that found in another nucleic acid sequence, and thus includes, but is not limited to, the sequences of an exon or intron, a promoter, an enhancer, an origin of replication, a 5′ or 3′ untranslated region, a coding region, and a polypeptide binding domain. It is understood that a fragment or subsequence can also comprise less than the entirety of a nucleic acid sequence, for example, a portion of an exon or intron, promoter, enhancer, etc. Similarly, a fragment or subsequence of an amino acid sequence can be any number of residues that is less than that found in a naturally occurring polypeptide, and thus includes, but is not limited to, domains, features, repeats, etc. Also similarly, it is understood that a fragment or subsequence of an amino acid sequence need not comprise the entirety of the amino acid sequence of the domain, feature, repeat, etc. A fragment can also be a “functional fragment”, in which the fragment retains a specific biological function of the nucleic acid sequence or amino acid sequence of interest. For example, a functional fragment of a transcription factor can include, but is not limited to, a DNA binding domain, a transactivating domain, or both. Similarly, a functional fragment of a receptor tyrosine kinase includes, but is not limited to a ligand binding domain, a kinase domain, an ATP binding domain, and combinations thereof.

[0161] As used herein, the term “gene” refers to a nucleic acid that encodes an RNA, for example, nucleic acid sequences including, but not limited to, structural genes encoding a polypeptide. The target gene can be a gene derived from a cell, an endogenous gene, a transgene, or exogenous genes such as genes of a pathogen, for example a virus, which is present in the cell after infection thereof. The cell containing the target gene can be derived from or contained in any organism, for example a plant, animal, protozoan, virus, bacterium, or fungus. The term “gene” also refers broadly to any segment of DNA associated with a biological function. As such, the term “gene” encompasses sequences including but not limited to a coding sequence, a promoter region, a transcriptional regulatory sequence, a non-expressed DNA segment that is a specific recognition sequence for regulatory proteins, a non-expressed DNA segment that contributes to gene expression, a DNA segment designed to have desired parameters, or combinations thereof. A gene can be obtained by a variety of methods, including cloning from a biological sample, synthesis based on known or predicted sequence information, and recombinant derivation from one or more existing sequences.

[0162] As is understood in the art, a gene comprises a coding strand and a non-coding strand. As used herein, the terms “coding strand” and “sense strand” are used interchangeably, and refer to a nucleic acid sequence that has the same sequence of nucleotides as an mRNA from which the gene product is translated. As is also understood in the art, when the coding strand and/or sense strand is used to refer to a DNA molecule, the coding/sense strand includes thymidine residues instead of the uridine residues found in the corresponding mRNA. Additionally, when used to refer to a DNA molecule, the coding/sense strand can also include additional elements not found in the mRNA including, but not limited to promoters, enhancers, and introns. Similarly, the terms “template strand” and “antisense strand” are used interchangeably and refer to a nucleic acid sequence that is complementary to the coding/sense strand.

[0163] As used herein, the terms “complementarity” and “complementary” refer to a nucleic acid that can form one or more hydrogen bonds with another nucleic acid sequence by either traditional Watson-Crick or other non-traditional types of interactions. In reference to the nucleic molecules of the presently disclosed subject matter, the binding free energy for a nucleic acid molecule with its complementary sequence is sufficient to allow the relevant function of the nucleic acid to proceed, in one embodiment, RNAi activity. For example, the degree of complementarity between the sense and antisense strands of the siRNA construct can be the same or different from the degree of complementarity between the antisense strand of the siRNA and the target nucleic acid sequence. Complementarity to the target sequence of less than 100% in the antisense strand of the siRNA duplex, including point mutations, is not well tolerated when these changes are located between the 3′-end and the middle of the antisense siRNA, whereas mutations near the 5′-end of the antisense siRNA strand can exhibit a small degree of RNAi activity (Elbashir et al., 2001). Determination of binding free energies for nucleic acid molecules is well known in the art. See e.g., Freier et al., 1986; Turner et al., 1987.

[0164] As used herein, the phrase “percent complementarity” refers to the percentage of contiguous residues in a nucleic acid molecule that can form hydrogen bonds (e.g., Watson-Crick base pairing) with a second nucleic acid sequence (e.g., 5, 6, 7, 8, 9, 10 out of 10 being 50%, 60%, 70%, 80%, 90%, and 100% complementary). The terms “100% complementary”, “fully complementary”, and “perfectly complementary” indicate that all of the contiguous residues of a nucleic acid sequence can hydrogen bond with the same number of contiguous residues in a second nucleic acid sequence.

[0165] The term “gene expression” generally refers to the cellular processes by which a biologically active polypeptide is produced from a DNA sequence and exhibits a biological activity in a cell. As such, gene expression involves the processes of transcription and translation, but also involves post-transcriptional and post-translational processes that can influence a biological activity of a gene or gene product. These processes include, but are not limited to RNA syntheses, processing, and transport, as well as polypeptide synthesis, transport, and post-translational modification of polypeptides. Additionally, processes that affect protein-protein interactions within the cell can also affect gene expression as defined herein.

[0166] The terms “heterologous”, “recombinant, and “exogenous”, when used herein to refer to a nucleic acid sequence (e.g., a DNA sequence) or a gene, refer to a sequence that originates from a source foreign to the particular host cell or, if from the same source, is modified from its original form. Thus, a heterologous gene in a host cell includes a gene that is endogenous to the particular host cell but has been modified through, for example, the use of DNA shuffling or other recombinant techniques (for example, cloning the gene into a vector). The terms also include non-naturally occurring multiple copies of a naturally occurring DNA sequence. Thus, the terms refer to a DNA segment that is foreign or heterologous to the cell, or homologous to the cell but in a position or form within the host cell in which the element is not ordinarily found. Similarly, when used in the context of a polypeptide or amino acid sequence, an exogenous polypeptide or amino acid sequence is a polypeptide or amino acid sequence that originates from a source foreign to the particular host cell or, if from the same source, is modified from its original form. Thus, exogenous DNA segments can be expressed to yield exogenous polypeptides.

[0167] A “homologous” nucleic acid (or amino acid) sequence is a nucleic acid (or amino acid) sequence naturally associated with a host cell into which it is introduced.

[0168] As used herein, the terms “host cells” and “recombinant host cells” are used interchangeably and refer cells (for example, plant cells) into which the compositions of the presently disclosed subject matter (for example, an expression vector) can be introduced. Furthermore, the terms refer not only to the particular plant cell into which an expression construct is initially introduced, but also to the progeny or potential progeny of such a cell. Because certain modifications can occur in succeeding generations due to either mutation or environmental influences, such progeny might not, in fact, be identical to the parent cell, but are still included within the scope of the term as used herein.

[0169] The phrase “hybridizing specifically to” refers to the binding, duplexing, or hybridizing of a molecule only to a particular nucleotide sequence under stringent conditions when that sequence is present in a complex mixture (e.g., total cellular) DNA or RNA. The phrase “bind(s) substantially” refers to complementary hybridization between a probe nucleic acid and a target nucleic acid and embraces minor mismatches that can be accommodated by reducing the stringency of the hybridization media to achieve the desired detection of the target nucleic acid sequence.

[0170] As used herein, the term “inhibitor” refers to a chemical substance that inactivates or decreases the biological activity of a polypeptide such as a biosynthetic and catalytic activity, receptor, signal transduction polypeptide, structural gene product, or transport polypeptide. The term “herbicide” (or “herbicidal compound”) is used herein to define an inhibitor applied to a plant at any stage of development, whereby the herbicide inhibits the growth of the plant or kills the plant.

[0171] An “isolated” nucleic acid molecule or protein, or biologically active portion thereof, is substantially free of other cellular material, or culture medium when produced by recombinant techniques, or substantially free of chemical precursors or other chemicals when chemically synthesized. Thus, the term “isolated nucleic acid” refers to a polynucleotide of genomic, cDNA, or synthetic origin or some combination thereof, which (1) is not associated with the cell in which the “isolated nucleic acid” is found in nature, or (2) is operatively linked to a polynucleotide to which it is not linked in nature. Similarly, the term “isolated polypeptide” refers to a polypeptide, in certain embodiments prepared from recombinant DNA or RNA, or of synthetic origin, or some combination thereof, which (1) is not associated with proteins that it is normally found with in nature, (2) is isolated from the cell in which it normally occurs, (3) is isolated free of other proteins from the same cellular source, (4) is expressed by a cell from a different species, or (5) does not occur in nature.

[0172] In certain embodiments, an “isolated” nucleic acid is free of sequences (e.g., protein encoding or regulatory sequences) that naturally flank the nucleic acid (i.e., sequences located at the 5′ and 3′ ends of the nucleic acid) in the genomic DNA of the organism from which the nucleic acid is derived. For example, in various embodiments, the isolated nucleic acid molecule can contain less than about 5 kb, 4 kb, 3 kb, 2 kb, 1 kb, 0.5 kb, or 0.1 kb of the nucleotide sequences that naturally flank the nucleic acid molecule in genomic DNA of the cell from which the nucleic acid is derived. A protein that is substantially free of cellular material includes preparations of protein or polypeptide having less than about 30%, 20%, 10%, or 5%, (by dry weight) of contaminating protein. When the protein of the presently disclosed subject matter, or biologically active portion thereof, is recombinantly produced, culture medium represents less than about 30%, 20%, 10%, or 5% (by dry weight) of chemical precursors or non-protein of interest chemicals. Thus, the term “isolated”, when used in the context of an isolated DNA molecule or an isolated polypeptide, refers to a DNA molecule or polypeptide that, by the hand of man, exists apart from its native environment and is therefore not a product of nature. An isolated DNA molecule or polypeptide can exist in a purified form or can exist in a non-native environment such as, for example, in a transgenic host cell.

[0173] The term “isolated”, when used in the context of an “isolated cell”, refers to a cell that has been removed from its natural environment, for example, as a part of an organ, tissue, or organism.

[0174] As used herein, the term “mature polypeptide” refers to a polypeptide from which the transit peptide, signal peptide, and/or propeptide portions have been removed.

[0175] As used herein, the term “minimal promoter” refers to the smallest piece of a promoter, such as a TATA element, that can support any transcription. A minimal promoter typically has greatly reduced promoter activity in the absence of upstream or downstream activation. In the presence of a suitable transcription factor, a minimal promoter can function to permit transcription.

[0176] As used herein, the term “modified enzyme activity” refers to enzyme activity that is different from that which naturally occurs in a plant (i.e. enzyme activity that occurs naturally in the absence of direct or indirect manipulation of such activity by man). In one embodiment, a modified enzyme activity is displayed by a non-naturally occurring enzyme that is tolerant to inhibitors that inhibit the cognate naturally occurring enzyme activity.

[0177] As used herein, the term “modulate” refers to an increase, decrease, or other alteration of any, or all, chemical and biological activities or properties of a biochemical entity, e.g., a wild-type or mutant nucleic acid molecule. As such, the term “modulate” can refer to a change in the expression level of a gene, or a level of RNA molecule or equivalent RNA molecules encoding one or more proteins or protein subunits, or activity of one or more proteins or protein subunits is up regulated or down regulated, such that expression, level, or activity is greater than or less than that observed in the absence of the modulator. For example, the term “modulate” can mean “inhibit” or “suppress”, but the use of the word “modulate” is not limited to this definition.

[0178] As used herein, the terms “inhibit”, “suppress”, “down regulate”, and grammatical variants thereof are used interchangeably and refer to an activity whereby gene expression or a level of an RNA encoding one or more gene products is reduced below that observed in the absence of a nucleic acid molecule of the presently disclosed subject matter. In one embodiment, inhibition with a nucleic acid molecule (for example, a dsRNA, an antisense RNA, or an siRNA) results in a decrease in the steady state level of a target RNA. In another embodiment, inhibition with a a nucleic acid molecule (for example, a dsRNA, an antisense RNA, or an siRNA) results in an expression level of a target gene that is below that level observed in the presence of an inactive or attenuated molecule that is unable to mediate an RNAi response. In another embodiment, inhibition of gene expression with a nucleic acid molecule (for example, a dsRNA, an antisense RNA, or an siRNA) of the presently disclosed subject matter is greater in the presence of the a nucleic acid molecule than in its absence. In still another embodiment, inhibition of gene expression is associated with an enhanced rate of degradation of the mRNA encoded by the gene (for example, by RNAi mediated by an siRNA, a dsRNA, or an antisense RNA).

[0179] The term “modulation” as used herein refers to both upregulation (i.e., activation or stimulation) and downregulation (i.e., inhibition or suppression) of a response. Thus, the term “modulation”, when used in reference to a functional property or biological activity or process (e.g., enzyme activity or receptor binding), refers to the capacity to upregulate (e.g., activate or stimulate), downregulate (e.g., inhibit or suppress), or otherwise change a quality of such property, activity, or process. In certain instances, such regulation can be contingent on the occurrence of a specific event, such as activation of a signal transduction pathway, and/or can be manifest only in particular cell types.

[0180] The term “modulator” refers to a polypeptide, nucleic acid, macromolecule, complex, molecule, small molecule, compound, species, or the like (naturally occurring or non-naturally occurring), or an extract made from biological materials such as bacteria, plants, fungi, or animal cells or tissues, that can be capable of causing modulation. Modulators can be evaluated for potential activity as inhibitors or activators (directly or indirectly) of a functional property, biological activity or process, or combination of them, (e.g., agonist, partial antagonist, partial agonist, inverse agonist, antagonist, anti-microbial agents, inhibitors of microbial infection or proliferation, and the like) by inclusion in assays. In such assays, many modulators can be screened at one time. The activity of a modulator can be known, unknown, or partially known.

[0181] Modulators can be either selective or non-selective. As used herein, the term “selective” when used in the context of a modulator (e.g., an inhibitor) refers to a measurable or otherwise biologically relevant difference in the way the modulator interacts with one molecule (e.g., a gene of interest) versus another similar but not identical molecule (e.g., a member of the same gene family as the gene of interest).

[0182] It must be understood that it is not required that the degree to which the interactions differ be completely opposite. Put another way, the term selective modulator encompasses not only those molecules that only bind to mRNA transcripts from a gene of interest and not those of related family members. The term is also intended to include modulators that are characterized by interactions with transcripts from genes of interest and from related family members that differ to a lesser degree. For example, selective modulators include modulators for which conditions can be found (such as the degree of sequence identity) that would allow a biologically relevant difference in the binding of the modulator to transcripts form the gene of interest versus transcripts from related genes.

[0183] When a selective modulator is identified, the modulator will bind to one molecule (for example an mRNA transcript of a gene of interest) in a manner that is different (for example, stronger) than it binds to another molecule (for example, an mRNA transcript of a gene related to the gene of interest). As used herein, the modulator is said to display “selective binding” or “preferential binding” to the molecule to which it binds more strongly.

[0184] As used herein, the term “mutation” carries its traditional connotation and refers to a change, inherited, naturally occurring or introduced, in a nucleic acid or polypeptide sequence, and is used in its sense as generally known to those of skill in the art.

[0185] As used herein, the term “native” refers to a gene that is naturally present in the genome of an untransformed plant cell. Similarly, when used in the context of a polypeptide, a “native polypeptide” is a polypeptide that is encoded by a native gene of an untransformed plant cell's genome.

[0186] As used herein, the term “naturally occurring” refers to an object that is found in nature as distinct from being artificially produced by man. For example, a polypeptide or nucleotide sequence that is present in an organism (including a virus) in its natural state, which has not been intentionally modified or isolated by man in the laboratory, is naturally occurring. As such, a polypeptide or nucleotide sequence is considered “non-naturally occurring” if it is encoded by or present within a recombinant molecule, even if the amino acid or nucleic acid sequence is identical to an amino acid or nucleic acid sequence found in nature.

[0187] As used herein, the terms “nucleic acid” and “nucleic acid molecule” refer to any of deoxyribonucleic acid (DNA), ribonucleic acid (RNA), oligonucleotides, fragments generated by the polymerase chain reaction (PCR), and fragments generated by any of ligation, scission, endonuclease action, and exonuclease action. Nucleic acids can be composed of monomers that are naturally occurring nucleotides (such as deoxyribonucleotides and ribonucleotides), or analogs of naturally occurring nucleotides (e.g., α-enantiomeric forms of naturally occurring nucleotides), or a combination of both. Modified nucleotides can have modifications in sugar moieties and/or in pyrimidine or purine base moieties. Sugar modifications include, for example, replacement of one or more hydroxyl groups with halogens, alkyl groups, amines, and azido groups, or sugars can be functionalized as ethers or esters. Moreover, the entire sugar moiety can be replaced with sterically and electronically similar structures, such as aza-sugars and carbocyclic sugar analogs. Examples of modifications in a base moiety include alkylated purines and pyrimidines, acylated purines or pyrimidines, or other well-known heterocyclic substitutes. Nucleic acid monomers can be linked by phosphodiester bonds or analogs of such linkages. Analogs of phosphodiester linkages include phosphorothioate, phosphorodithioate, phosphoroselenoate, phosphorodiselenoate, phosphoroanilothioate, phosphoranilidate, phosphoramidate, and the like. The term “nucleic acid” also includes so-called “peptide nucleic acids”, which comprise naturally occurring or modified nucleic acid bases attached to a polyamide backbone. Nucleic acids can be either single stranded or double stranded.

[0188] The term “operatively linked”, when describing the relationship between two nucleic acid regions, refers to a juxtaposition wherein the regions are in a relationship permitting them to function in their intended manner. For example, a control sequence “operatively linked” to a coding sequence is ligated in such a way that expression of the coding sequence is achieved under conditions compatible with the control sequences, such as when the appropriate molecules (e.g., inducers and polymerases) are bound to the control or regulatory sequence(s). Thus, in one embodiment, the phrase “operatively linked” refers to a promoter connected to a coding sequence in such a way that the transcription of that coding sequence is controlled and regulated by that promoter. Techniques for operatively linking a promoter to a coding sequence are well known in the art; the precise orientation and location relative to a coding sequence of interest is dependent, inter alia, upon the specific nature of the promoter.

[0189] Thus, the term “operatively linked” can refer to a promoter region that is connected to a nucleotide sequence in such a way that the transcription of that nucleotide sequence is controlled and regulated by that promoter region. Similarly, a nucleotide sequence is said to be under the “transcriptional control” of a promoter to which it is operatively linked. Techniques for operatively linking a promoter region to a nucleotide sequence are known in the art. The term “operatively linked” can also refer to a transcription termination sequence or other nucleic acid that is connected to a nucleotide sequence in such a way that termination of transcription of that nucleotide sequence is controlled by that transcription termination sequence. Additionally, the term “operatively linked” can refer to a enhancer, silencer, or other nucleic acid regulatory sequence that when operatively linked to an open reading frame modulates the expression of that open reading frame, either in a positive or negative fashion.

[0190] As used herein, the phrase “percent identical”,” in the context of two nucleic acid or polypeptide sequences, refers to two or more sequences or subsequences that have in one embodiment 60%, in another embodiment 70%, in another embodiment 80%, in another embodiment 90%, in another embodiment 95%, and in still another embodiment at least 99% nucleotide or amino acid residue identity, respectively, when compared and aligned for maximum correspondence, as measured using one of the following sequence comparison algorithms or by visual inspection. The percent identity exists in one embodiment over a region of the sequences that is at least about 50 residues in length, in another embodiment over a region of at least about 100 residues, and in another embodiment, the percent identity exists over at least about 150 residues. In still another embodiment, the percent identity exists over the entire length of the sequences.

[0191] For sequence comparison, typically one sequence acts as a reference sequence to which test sequences are compared. When using a sequence comparison algorithm, test and reference sequences are input into a computer, subsequence coordinates are designated if necessary, and sequence algorithm program parameters are designated. The sequence comparison algorithm then calculates the percent sequence identity for the test sequence(s) relative to the reference sequence, based on the designated program parameters.

[0192] Optimal alignment of sequences for comparison can be conducted, for example, by the local homology algorithm disclosed in Smith & Waterman, 1981, by the homology alignment algorithm disclosed in Needleman & Wunsch, 1970, by the search for similarity method disclosed in Pearson & Lipman, 1988, by computerized implementations of these algorithms (GAP, BESTFIT, FASTA, and TFASTA in the GCG Wisconsin Package, available from Accelrys, Inc., San Diego, Calif., United States of America), or by visual inspection. See generally, Ausubel et al., 1988.

[0193] One example of an algorithm that is suitable for determining percent sequence identity and sequence similarity is the BLAST algorithm, which is described in Altschul et al., 1990. Software for performing BLAST analysis is publicly available through the National Center for Biotechnology Information (http://www.ncbi.nlm.nih.gov/). This algorithm involves first identifying high scoring sequence pairs (HSPs) by identifying short words of length W in the query sequence, which either match or satisfy some positive valued threshold score T when aligned with a word of the same length in a database sequence. T is referred to as the neighborhood word score threshold. See generally, Altschul et al., 1990. These initial neighborhood word hits act as seeds for initiating searches to find longer HSPs containing them. The word hits are then extended in both directions along each sequence for as far as the cumulative alignment score can be increased. Cumulative scores are calculated using, for nucleotide sequences, the parameters M (reward score for a pair of matching residues; always >0) and N (penalty score for mismatching residues; always <0). For amino acid sequences, a scoring matrix is used to calculate the cumulative score. Extension of the word hits in each direction are halted when the cumulative alignment score falls off by the quantity X from its maximum achieved value, the cumulative score goes to zero or below due to the accumulation of one or more negative scoring residue alignments, or the end of either sequence is reached. The BLAST algorithm parameters W, T, and X determine the sensitivity and speed of the alignment. The BLASTN program (for nucleotide sequences) uses as defaults a wordlength (W) of 11, an expectation (E) of 10, a cutoff of 100, M=5, N=4, and a comparison of both strands. For amino acid sequences, the BLASTP program uses as defaults a wordlength (W) of 3, an expectation (E) of 10, and the BLOSUM62 scoring matrix. See Henikoff & Henikoff, 1992.

[0194] In addition to calculating percent sequence identity, the BLAST algorithm also performs a statistical analysis of the similarity between two sequences (see e.g., Karlin & Altschul, 1993). One measure of similarity provided by the BLAST algorithm is the smallest sum probability (P(N)), which provides an indication of the probability by which a match between two nucleotide or amino acid sequences would occur by chance. For example, a test nucleic acid sequence is considered similar to a reference sequence if the smallest sum probability in a comparison of the test nucleic acid sequence to the reference nucleic acid sequence is in one embodiment less than about 0.1, in another embodiment less than about 0.01, and in still another embodiment less than about 0.001.

[0195] The phrase “hybridizing substantially to” refers to complementary hybridization between a probe nucleic acid molecule and a target nucleic acid molecule and embraces minor mismatches (for example, polymorphisms) that can be accommodated by reducing the stringency of the hybridization and/or wash media to achieve the desired hybridization.

[0196] “Stringent hybridization conditions” and “stringent hybridization wash conditions” in the context of nucleic acid hybridization experiments such as Southern and Northern blot analysis are both sequence- and environment-dependent. Longer sequences hybridize specifically at higher temperatures. An extensive guide to the hybridization of nucleic acids is found in Tijssen, 1993. Generally, high stringency hybridization and wash conditions are selected to be about 5° C. lower than the thermal melting point (Tₘ) for the specific sequence at a defined ionic strength and pH. Typically, under “highly stringent conditions” a probe will hybridize specifically to its target subsequence, but to no other sequences. Similarly, medium stringency hybridization and wash conditions are selected to be more than about 5° C. lower than the Tₘ for the specific sequence at a defined ionic strength and pH. Exemplary medium stringency conditions include hybridizations and washes as for high stringency conditions, except that the temperatures for the hybridization and washes are in one embodiment 8° C., in another embodiment 10° C., in another embodiment 12° C., and in still another embodiment 15° C. lower than the Tₘ for the specific sequence at a defined ionic strength and pH.

[0197] The Tₘ is the temperature (under defined ionic strength and pH) at which 50% of the target sequence hybridizes to a perfectly matched probe. Very stringent conditions are selected to be equal to the Tₘ for a particular probe. An example of highly stringent hybridization conditions for Southern or Northern Blot analysis of complementary nucleic acids having more than about 100 complementary residues is overnight hybridization in 50% formamide with 1 mg of heparin at 42° C. An example of highly stringent wash conditions is 15 minutes in 0.1× standard saline citrate (SSC), 0.1% (w/v) SDS at 65° C. Another example of highly stringent wash conditions is 15 minutes in 0.2×SSC buffer at 65° C. (see Sambrook and Russell, 2001 for a description of SSC buffer and other stringency conditions). Often, a high stringency wash is preceded by a lower stringency wash to remove background probe signal. An example of medium stringency wash conditions for a duplex of more than about 100 nucleotides is 15 minutes in 1×SSC at 45° C. Another example of medium stringency wash for a duplex of more than about 100 nucleotides is 15 minutes in 4-6×SSC at 40° C. For short probes (e.g., about 10 to 50 nucleotides), stringent conditions typically involve salt concentrations of less than about 1M Na+ ion, typically about 0.01 to 1M Na+ ion concentration (or other salts) at pH 7.0-8.3, and the temperature is typically at least about 30° C. Stringent conditions can also be achieved with the addition of destabilizing agents such as formamide. In general, a signal to noise ratio of 2-fold (or higher) than that observed for an unrelated probe in the particular hybridization assay indicates detection of a specific hybridization.

[0198] The following are examples of hybridization and wash conditions that can be used to clone homologous nucleotide sequences that are substantially similar to reference nucleotide sequences of the presently disclosed subject matter: a probe nucleotide sequence hybridizes in one example to a target nucleotide sequence in 7% sodium dodecyl sulfate (NaDS), 0.5M NaPO4, 1 mm ethylene diamine tetraacetic acid (EDTA) at 50° C. followed by washing in 2×SSC, 0.1% NaDS at 50° C.; in another example, a probe and target sequence hybridize in 7% NaDS, 0.5 M NaPO4, 1 mm EDTA at 50° C. followed by washing in 1×SSC, 0.1% NaDS at 50° C.; in another example, a probe and target sequence hybridize in 7% NaDS, 0.5 M NaPO4, 1 mm EDTA at 50° C. followed by washing in 0.5×SSC, 0.1% NaDS at 50° C.; in another example, a probe and target sequence hybridize in 7% NaDS, 0.5 M NaPO4, 1 mm EDTA at 50° C. followed by washing in 0.1×SSC, 0.1% NaDS at 50° C.; in yet another example, a probe and target sequence hybridize in 7% NaDS, 0.5 M NaPO4, 1 mm EDTA at 50° C. followed by washing in 0.1×SSC, 0.1% NaDS at 65° C. In one embodiment, hybridization conditions comprise hybridization in a roller tube for at least 12 hours at 42° C.

[0199] The term “phenotype” refers to the entire physical, biochemical, and physiological makeup of a cell or an organism, e.g., having any one trait or any group of traits. As such, phenotypes result from the expression of genes within a cell or an organism, and relate to traits that are potentially observable or assayable.

[0200] As used herein, the terms “polypeptide”, “protein”, and “peptide”, which are used interchangeably herein, refer to a polymer of the 20 protein amino acids, or amino acid analogs, regardless of its size or function. Although “protein” is often used in reference to relatively large polypeptides, and “peptide” is often used in reference to small polypeptides, usage of these terms in the art overlaps and varies. The term “polypeptide” as used herein refers to peptides, polypeptides and proteins, unless otherwise noted. As used herein, the terms “protein”, “polypeptide” and “peptide” are used interchangeably herein when referring to a gene product. The term “polypeptide” encompasses proteins of all functions, including enzymes. Thus, exemplary polypeptides include gene products, naturally occurring proteins, homologs, orthologs, paralogs, fragments, and other equivalents, variants and analogs of the foregoing.

[0201] The terms “polypeptide fragment” or “fragment”, when used in reference to a reference polypeptide, refers to a polypeptide in which amino acid residues are deleted as compared to the reference polypeptide itself, but where the remaining amino acid sequence is usually identical to the corresponding positions in the reference polypeptide. Such deletions can occur at the amino-terminus or carboxy-terminus of the reference polypeptide, or alternatively both. Fragments typically are at least 5, 6, 8 or 10 amino acids long, at least 14 amino acids long, at least 20, 30, 40 or 50 amino acids long, at least 75 amino acids long, or at least 100, 150, 200, 300, 500 or more amino acids long. A fragment can retain one or more of the biological activities of the reference polypeptide. In certain embodiments, a fragment can comprise a domain or feature, and optionally additional amino acids on one or both sides of the domain or feature, which additional amino acids can number from 5, 10, 15, 20, 30, 40, 50, or up to 100 or more residues. Further, fragments can include a sub-fragment of a specific region, which sub-fragment retains a function of the region from which it is derived. In another embodiment, a fragment can have immunogenic properties.

[0202] As used herein, the term “pre-polypeptide” refers to a polypeptide that is normally targeted to a cellular organelle, such as a chloroplast, and still comprises a transit peptide.

[0203] As used herein, the term “primer” refers to a sequence comprising in one embodiment two or more deoxyribonucleotides or ribonucleotides, in another embodiment more than three, in another embodiment more than eight, and in yet another embodiment at least about 20 nucleotides of an exonic or intronic region. Such oligonucleotides are in one embodiment between ten and thirty bases in length.

[0204] The term “promoter” or “promoter region” each refers to a nucleotide sequence within a gene that is positioned 5′ to a coding sequence and functions to direct transcription of the coding sequence. The promoter region comprises a transcriptional start site, and can additionally include one or more transcriptional regulatory elements. In one embodiment, a method of the presently disclosed subject matter employs a RNA polymerase III promoter.

[0205] A “minimal promoter” is a nucleotide sequence that has the minimal elements required to enable basal level transcription to occur. As such, minimal promoters are not complete promoters but rather are subsequences of promoters that are capable of directing a basal level of transcription of a reporter construct in an experimental system. Minimal promoters include but are not limited to the CMV minimal promoter, the HSV-tk minimal promoter, the simian virus 40 (SV40) minimal promoter, the human b-actin minimal promoter, the human EF2 minimal promoter, the adenovirus E1B minimal promoter, and the heat shock protein (hsp) 70 minimal promoter. Minimal promoters are often augmented with one or more transcriptional regulatory elements to influence the transcription of an operatively linked gene. For example, cell-type-specific or tissue-specific transcriptional regulatory elements can be added to minimal promoters to create recombinant promoters that direct transcription of an operatively linked nucleotide sequence in a cell-type-specific or tissue-specific manner

[0206] Different promoters have different combinations of transcriptional regulatory elements. Whether or not a gene is expressed in a cell is dependent on a combination of the particular transcriptional regulatory elements that make up the gene's promoter and the different transcription factors that are present within the nucleus of the cell. As such, promoters are often classified as “constitutive”, “tissue-specific”, “cell-type-specific”, or “inducible”, depending on their functional activities in vivo or in vitro. For example, a constitutive promoter is one that is capable of directing transcription of a gene in a variety of cell types. Exemplary constitutive promoters include the promoters for the following genes which encode certain constitutive or “housekeeping” functions: hypoxanthine phosphoribosyl transferase (HPRT), dihydrofolate reductase (DHFR; Scharfmann et al., 1991), adenosine deaminase, phosphoglycerate kinase (PGK), pyruvate kinase, phosphoglycerate mutase, the β-actin promoter (see e.g., Williams et al., 1993), and other constitutive promoters known to those of skill in the art. “Tissue-specific” or “cell-type-specific” promoters, on the other hand, direct transcription in some tissues and cell types but are inactive in others. Exemplary tissue-specific promoters include those promoters described in more detail hereinbelow, as well as other tissue-specific and cell-type specific promoters known to those of skill in the art.

[0207] When used in the context of a promoter, the term “linked” as used herein refers to a physical proximity of promoter elements such that they function together to direct transcription of an operatively linked nucleotide sequence

[0208] The term “transcriptional regulatory sequence” or “transcriptional regulatory element”, as used herein, each refers to a nucleotide sequence within the promoter region that enables responsiveness to a regulatory transcription factor. Responsiveness can encompass a decrease or an increase in transcriptional output and is mediated by binding of the transcription factor to the DNA molecule comprising the transcriptional regulatory element. In one embodiment, a transcriptional regulatory sequence is a transcription termination sequence, alternatively referred to herein as a transcription termination signal.

[0209] The term “transcription factor” generally refers to a protein that modulates gene expression by interaction with the transcriptional regulatory element and cellular components for transcription, including RNA Polymerase, Transcription Associated Factors (TAFs), chromatin-remodeling proteins, and any other relevant protein that impacts gene transcription.

[0210] As used herein, “significance” or “significant” relates to a statistical analysis of the probability that there is a non-random association between two or more entities. To determine whether or not a relationship is “significant” or has “significance”, statistical manipulations of the data can be performed to calculate a probability, expressed as a “p-value”. Those p-values that fall below a user-defined cutoff point are regarded as significant. In one example, a p-value less than or equal to 0.05, in another example less than 0.01, in another example less than 0.005, and in yet another example less than 0.001, are regarded as significant.

[0211] The term “purified” refers to an object species that is the predominant species present (i.e., on a molar basis it is more abundant than any other individual species in the composition). A “purified fraction” is a composition, wherein the object species comprises at least about 50 percent (on a molar basis) of all species present. In making the determination of the purity of a species in solution or dispersion, the solvent or matrix in which the species is dissolved or dispersed is usually not included in such determination; instead, only the species (including the one of interest) dissolved or dispersed are taken into account. Generally, a purified composition will have one species that comprises more than about 80 percent of all species present in the composition, more than about 85%, 90%, 95%, 99% or more of all species present. The object species can be purified to essential homogeneity (contaminant species cannot be detected in the composition by conventional detection methods) wherein the composition consists essentially of a single species. A skilled artisan can purify a polypeptide of the presently disclosed subject matter using standard techniques for protein purification in light of the teachings herein. Purity of a polypeptide can be determined by a number of methods known to those of skill in the art, including for example, amino-terminal amino acid sequence analysis, gel electrophoresis, and mass-spectrometry analysis.

[0212] A “reference sequence” is a defined sequence used as a basis for a sequence comparison. A reference sequence can be a subset of a larger sequence, for example, as a segment of a full-length nucleotide or amino acid sequence, or can comprise a complete sequence. Generally, when used to refer to a nucleotide sequence, a reference sequence is at least 200, 300 or 400 nucleotides in length, frequently at least 600 nucleotides in length, and often at least 800 nucleotides in length. Because two proteins can each (1) comprise a sequence (i.e., a portion of the complete protein sequence) that is similar between the two proteins, and (2) can further comprise a sequence that is divergent between the two proteins, sequence comparisons between two (or more) proteins are typically performed by comparing sequences of the two proteins over a “comparison window” (defined hereinabove) to identify and compare local regions of sequence similarity.

[0213] The term “regulatory sequence” is a generic term used throughout the specification to refer to polynucleotide sequences, such as initiation signals, enhancers, regulators, promoters, and termination sequences, which are necessary or desirable to affect the expression of coding and non-coding sequences to which they are operatively linked. Exemplary regulatory sequences are described in Goeddel, 1990, and include, for example, the early and late promoters of simian virus 40 (SV40), adenovirus or cytomegalovirus immediate early promoter, the lac system, the trp system, the TAC or TRC system, T7 promoter whose expression is directed by T7 RNA polymerase, the major operator and promoter regions of phage lambda, the control regions for fd coat protein, the promoter for 3-phosphoglycerate kinase or other glycolytic enzymes, the promoters of acid phosphatase, e.g., Pho5, the promoters of the yeast a-mating factors, the polyhedron promoter of the baculovirus system and other sequences known to control the expression of genes of prokaryotic or eukaryotic cells or their viruses, and various combinations thereof. The nature and use of such control sequences can differ depending upon the host organism. In prokaryotes, such regulatory sequences generally include promoter, ribosomal binding site, and transcription termination sequences. The term “regulatory sequence” is intended to include, at a minimum, components whose presence can influence expression, and can also include additional components whose presence is advantageous, for example, leader sequences and fusion partner sequences.

[0214] In certain embodiments, transcription of a polynucleotide sequence is under the control of a promoter sequence (or other regulatory sequence) that controls the expression of the polynucleotide in a cell-type in which expression is intended. It will also be understood that the polynucleotide can be under the control of regulatory sequences that are the same or different from those sequences which control expression of the naturally occurring form of the polynucleotide.

[0215] The term “reporter gene” refers to a nucleic acid comprising a nucleotide sequence encoding a protein that is readily detectable either by its presence or activity, including, but not limited to, luciferase, fluorescent protein (e.g., green fluorescent protein), chloramphenicol acetyl transferase, β-galactosidase, secreted placental alkaline phosphatase, β-lactamase, human growth hormone, and other secreted enzyme reporters. Generally, a reporter gene encodes a polypeptide not otherwise produced by the host cell, which is detectable by analysis of the cell(s), e.g., by the direct fluorometric, radioisotopic or spectrophotometric analysis of the cell(s) and typically without the need to kill the cells for signal analysis. In certain instances, a reporter gene encodes an enzyme, which produces a change in fluorometric properties of the host cell, which is detectable by qualitative, quantitative, or semiquantitative function or transcriptional activation. Exemplary enzymes include esterases, β-lactamase, phosphatases, peroxidases, proteases (tissue plasminogen activator or urokinase) and other enzymes whose function can be detected by appropriate chromogenic or fluorogenic substrates known to those skilled in the art or developed in the future.

[0216] As used herein, the term “sequencing refers to determining the ordered linear sequence of nucleic acids or amino acids of a DNA or protein target sample, using conventional manual or automated laboratory techniques.

[0217] As used herein, the term substantially pure” refers to that the polynucleotide or polypeptide is substantially free of the sequences and molecules with which it is associated in its natural state, and those molecules used in the isolation procedure. The term “substantially free” refers to that the sample is in one embodiment at least 50%, in another embodiment at least 70%, in another embodiment 80% and in still another embodiment 90% free of the materials and compounds with which is it associated in nature.

[0218] As used herein, the term “target cell” refers to a cell, into which it is desired to insert a nucleic acid sequence or polypeptide, or to otherwise effect a modification from conditions known to be standard in the unmodified cell. A nucleic acid sequence introduced into a target cell can be of variable length. Additionally, a nucleic acid sequence can enter a target cell as a component of a plasmid or other vector or as a naked sequence.

[0219] As used herein, the term “transcription” refers to a cellular process involving the interaction of an RNA polymerase with a gene that directs the expression as RNA of the structural information present in the coding sequences of the gene. The process includes, but is not limited to, the following steps: (a) the transcription initiation; (b) transcript elongation; (c) transcript splicing; (d) transcript capping; (e) transcript termination; (f) transcript polyadenylation; (g) nuclear export of the transcript; (h) transcript editing; and (i) stabilizing the transcript.

[0220] As used herein, the term “transcription factor” refers to a cytoplasmic or nuclear protein which binds to a gene, or binds to an RNA transcript of a gene, or binds to another protein which binds to a gene or an RNA transcript or another protein which in turn binds to a gene or an RNA transcript, so as to thereby modulate expression of the gene. Such modulation can additionally be achieved by other mechanisms; the essence of a “transcription factor for a gene” pertains to a factor that alters the level of transcription of the gene in some way.

[0221] The term “transfection” refers to the introduction of a nucleic acid, e.g., an expression vector, into a recipient cell, which in certain instances involves nucleic acid-mediated gene transfer. The term “transformation” refers to a process in which a cell's genotype is changed as a result of the cellular uptake of exogenous nucleic acid. For example, a transformed cell can express a recombinant form of a polypeptide of the presently disclosed subject matter or antisense expression can occur from the transferred gene so that the expression of a naturally occurring form of the gene is disrupted.

[0222] The term “vector” refers to a nucleic acid capable of transporting another nucleic acid to which it has been linked. One type of vector that can be used in accord with the presently disclosed subject matter is an episome, i.e., a nucleic acid capable of extra-chromosomal replication. Other vectors include those capable of autonomous replication and expression of nucleic acids to which they are linked. Vectors capable of directing the expression of genes to which they are operatively linked are referred to herein as “expression vectors”. In general, expression vectors of utility in recombinant DNA techniques are often in the form of plasmids. In the present specification, “plasmid” and “vector” are used interchangeably as the plasmid is the most commonly used form of vector. However, the presently disclosed subject matter is intended to include such other forms of expression vectors which serve equivalent functions and which become known in the art subsequently hereto.

[0223] The term “expression vector” as used herein refers to a DNA sequence capable of directing expression of a particular nucleotide sequence in an appropriate host cell, comprising a promoter operatively linked to the nucleotide sequence of interest which is operatively linked to transcription termination sequences. It also typically comprises sequences required for proper translation of the nucleotide sequence. The construct comprising the nucleotide sequence of interest can be chimeric. The construct can also be one that is naturally occurring but has been obtained in a recombinant form useful for heterologous expression. The nucleotide sequence of interest, including any additional sequences designed to effect proper expression of the nucleotide sequences, can also be referred to as an “expression cassette”.

[0224] The terms “heterologous gene”, “heterologous DNA sequence”, “heterologous nucleotide sequence”, “exogenous nucleic acid molecule”, or “exogenous DNA segment”, as used herein, each refer to a sequence that originates from a source foreign to an intended host cell or, if from the same source, is modified from its original form. Thus, a heterologous gene in a host cell includes a gene that is endogenous to the particular host cell but has been modified, for example by mutagenesis or by isolation from native transcriptional regulatory sequences. The terms also include non-naturally occurring multiple copies of a naturally occurring nucleotide sequence. Thus, the terms refer to a DNA segment that is foreign or heterologous to the cell, or homologous to the cell but in a position within the host cell nucleic acid wherein the element is not ordinarily found.

[0225] Two nucleic acids are “recombined” when sequences from each of the two nucleic acids are combined in a progeny nucleic acid. Two sequences are “directly” recombined when both of the nucleic acids are substrates for recombination. Two sequences are “indirectly recombined” when the sequences are recombined using an intermediate such as a cross over oligonucleotide. For indirect recombination, no more than one of the sequences is an actual substrate for recombination, and in some cases, neither sequence is a substrate for recombination.

[0226] As used herein, the term “regulatory elements” refers to nucleotide sequences involved in controlling the expression of a nucleotide sequence. Regulatory elements can comprise a promoter operatively linked to the nucleotide sequence of interest and termination signals. Regulatory sequences also include enhancers and silencers. They also typically encompass sequences required for proper translation of the nucleotide sequence.

[0227] As used herein, the term “significant increase” refers to an increase in activity (for example, enzymatic activity) that is larger than the margin of error inherent in the measurement technique, in one embodiment an increase by about 2 fold or greater over a baseline activity (for example, the activity of the wild type enzyme in the presence of the inhibitor), in another embodiment an increase by about 5 fold or greater, and in still another embodiment an increase by about 10 fold or greater.

[0228] As used herein, the terms “significantly less” and “significantly reduced” refer to a result (for example, an amount of a product of an enzymatic reaction) that is reduced by more than the margin of error inherent in the measurement technique, in one embodiment a decrease by about 2 fold or greater with respect to a baseline activity (for example, the activity of the wild type enzyme in the absence of the inhibitor), in another embodiment, a decrease by about 5 fold or greater, and in still another embodiment a decrease by about 10 fold or greater.

[0229] As used herein, the terms “specific binding” and “immunological cross-reactivity” refer to an indicator that two molecules are substantially similar. An indication that two nucleic acid sequences or polypeptides are substantially similar is that the polypeptide encoded by the first nucleic acid is immunologically cross reactive with, or specifically binds to, the polypeptide encoded by the second nucleic acid. Thus, a polypeptide is typically substantially similar to a second polypeptide, for example, where the two polypeptides differ only by conservative substitutions.

[0230] The phrase “specifically (or selectively) binds to an antibody,” or “specifically (or selectively) immunoreactive with,” when referring to a polypeptide or peptide, refers to a binding reaction which is determinative of the presence of the polypeptide in the presence of a heterogeneous population of polypeptides and other biologics. Thus, under designated immunoassay conditions, the specified antibodies bind to a particular polypeptide and do not bind in a significant amount to other polypeptides present in the sample. Specific binding to an antibody under such conditions can require an antibody that is selected for its specificity for a particular polypeptide. For example, antibodies raised to the polypeptide with the amino acid sequence encoded by any of the nucleic acid sequences of the presently disclosed subject matter can be selected to obtain antibodies specifically immunoreactive with that polypeptide and not with other polypeptides except for polymorphic variants. A variety of immunoassay formats can be used to select antibodies specifically immunoreactive with a particular polypeptide. For example, solid phase ELISA immunoassays, Western blots, or immunohistochemistry are routinely used to select monoclonal antibodies specifically immunoreactive with a polypeptide. See Harlow & Lane, 1988, for a description of immunoassay formats and conditions that can be used to determine specific immunoreactivity. Typically a specific or selective reaction will be at least twice background signal or noise and more typically more than 10 to 100 times background.

[0231] As used herein, the term “subsequence” refers to a sequence of nucleic acids or amino acids that comprises a part of a longer sequence of nucleic acids or amino acids (e.g., polypeptide), respectively.

[0232] As used herein, the term “substrate” refers to a molecule that an enzyme naturally recognizes and converts to a product in the biochemical pathway in which the enzyme naturally carries out its function; or is a modified version of the molecule, which is also recognized by the enzyme and is converted by the enzyme to a product in an enzymatic reaction similar to the naturally-occurring reaction.

[0233] As used herein, the term “suitable growth conditions” refers to growth conditions that are suitable for a certain desired outcome, for example, the production of a recombinant polypeptide or the expression of a nucleic acid molecule.

[0234] As used herein, the term “transformation” refers to a process for introducing heterologous DNA into a plant cell, plant tissue, or plant. Transformed plant cells, plant tissue, or plants are understood to encompass not only the end product of a transformation process, but also transgenic progeny thereof.

[0235] As used herein, the terms “transformed”, “transgenic”, and “recombinant” refer to a host organism such as a bacterium or a plant into which a heterologous nucleic acid molecule has been introduced. The nucleic acid molecule can be stably integrated into the genome of the host or the nucleic acid molecule can also be present as an extrachromosomal molecule. Such an extrachromosomal molecule can be auto-replicating. Transformed cells, tissues, or plants are understood to encompass not only the end product of a transformation process, but also transgenic progeny thereof. A “non-transformed,”“non-transgenic”, or “non-recombinant” host refers to a wild-type organism, e.g., a bacterium or plant, which does not contain the heterologous nucleic acid molecule.

[0236] As used herein, the term “viability” refers to a fitness parameter of a plant. Plants are assayed for their homozygous performance of plant development, indicating which polypeptides are essential for plant growth.

III. Nucleic Acids and Polypeptides

[0237] In one aspect, the presently disclosed subject matter provides an isolated nucleic acid molecule encoding a cell proliferation-related polypeptide, wherein the polypeptide binds to a fragment of a protein selected from the group consisting of OsE2F1, Os018989-4003, OsE2F2, OsS49462, OsCYCOS2, OsMADS45, OsRAP1B, OsMADS6, OsFDRMADS8, OsMADS3, OsMADS5, OsMADS15, OsHOS59, OsGF14-c, OsDAD1, Os006819-2510, OsCRTC, OsSGT1, OsERP, OsCHIB1, OsCS, OsPP2A-2, and OsCAA90866. In certain embodiments, the isolated nucleic acid molecule is derived from rice (i.e., Oryza sativa).

[0238] As used herein, the phrase “cell proliferation-related polypeptide” refers to a protein or polypeptide (note that these two terms are used interchangeably throughout) that is involved in cell proliferation, particularly plant cell proliferation. Such a polypeptide can be involved in an increase in cell proliferation; conversely, such a polypeptide can be involved in the abrogation or inhibition of cell proliferation. Moreover, the polypeptide can be involved in cell proliferation only, for example, when the cell is exposed to a stress (e.g., biotic or abiotic stress). In addition, the polypeptide can be involved in cell proliferation only when the cell is differentiating or developing. A “cell proliferation-related polypeptide” of the presently disclosed subject matter is identified by the ability of an increase or decrease in the level of expression of such a polypeptide in a cell to modulate the rate of that cell's proliferation, whether alone or together with some other stimuli (e.g., presence of growth factor, presence of stress).

[0239] As used herein, term “binds” means that a cell proliferation-related polypeptide preferentially interacts with a stated target molecule. In some embodiments, that interaction allows a biological read-out (e.g., a positive in the yeast two-hybrid system). In some embodiments, that interaction is measurable (e.g., a K_{D} of at least 10⁻⁵ M).

[0240] Disclosed herein are rice (O. sativa)-derived cDNAs encoding plant proteins that interact with OsE2F1, Os018989-4003, OsE2F2, OsS49462, OsCYCOS2, OsMADS45, OsRAP1B, OsMADS6, OsFDRMADS8, OsMADS3, OsMADS5, OsMADS15, OsHOS59, OsGF14-c, OsDAD1, Os006819-2510, OsCRTC, OsSGT1, OsERP, OsCHIB1, OsCS, OsPP2A-2, and OsCAA90866 in the yeast two-hybrid system. All of the cell proliferation-related proteins of the invention are related, and many interact with one another. FIGS. 1-6 are schematic representations showing the interrelatedness of the different cell proliferation-related proteins of the invention.

[0241] In certain embodiments, the presently disclosed subject matter provides an isolated nucleic acid molecule comprising a nucleotide sequence substantially similar to the nucleotide sequence of the nucleic acid molecule encoding a cell proliferation-related polypeptide disclosed herein.

[0242] In a broad sense, the term “substantially similar”, as used herein with respect to a nucleotide sequence, refers to a nucleotide sequence corresponding to a reference nucleotide sequence (i.e., a nucleotide sequence of a nucleic acid molecule encoding a cell proliferation-related protein of the presently disclosed subject matter), wherein the corresponding sequence encodes a polypeptide having substantially the same structure as the polypeptide encoded by the reference nucleotide sequence. In some embodiments, the substantially similar nucleotide sequence encodes the polypeptide encoded by the reference nucleotide sequence (i.e., although the nucleotide sequence is different, the encoded protein has the same amino acid sequence). In some embodiments, “substantially similar” refers to nucleotide sequences having at least 50% sequence identity, or at least 60%, 70%, 80% or 85%, or at least 90% or 95%, or at least 96%, 97% or 99% sequence identity, compared to a reference sequence containing nucleotide sequences encoding one of the cell proliferation-related proteins of the presently disclosed subject matter (e.g., the proteins described below in the Examples).

[0243] “Substantially similar” also refers to nucleotide sequences having at least 50% identity, or at least 80% identity, or at least 95% identity, or at least 99% identity, to a region of nucleotide sequence encoding a BIOPATH protein and/or an Functional Protein Domain (FPD), wherein the nucleotide sequence comparisons are conducted using GAP analysis as described herein. The term “substantially similar” is specifically intended to include nucleotide sequences wherein the sequence has been modified to optimize expression in particular cells.

[0244] A polynucleotide including a nucleotide sequence “substantially similar” to the reference nucleotide sequence hybridizes to a polynucleotide including the reference nucleotide sequence in one embodiment in 7% sodium dodecyl sulfate (SDS), 0.5 M NaPO₄, 1 mM ethylenediamine teatraacetic acid (EDTA) at 50° C. with washing in 2× standard saline citrate (SSC), 0.1% SDS at 50° C., in another embodiment in 7% sodium dodecyl sulfate (SDS), 0.5 M NaPO₄, 1 mM EDTA at 50° C. with washing in 1×SSC, 0.1% SDS at 50° C., in another embodiment in 7% sodium dodecyl sulfate (SDS), 0.5 M NaPO₄, 1 mM EDTA at 50° C. with washing in 0.5×SSC, 0.1% SDS at 50° C., or in 7% sodium dodecyl sulfate (SDS), 0.5 M NaPO₄, 1 mM EDTA at 50° C. with washing in 0.1×SSC, 0.1% SDS at 50° C., or in still another embodiment in 7% sodium dodecyl sulfate (SDS), 0.5 M NaPO₄, 1 mM EDTA at 50° C. with washing in 0.1×SSC, 0.1% SDS at 65° C.

[0245] The term “substantially similar”, when used herein with respect to a protein or polypeptide, refers to a protein or polypeptide corresponding to a reference protein (i.e., a cell proliferation-related protein of the presently disclosed subject matter), wherein the protein has substantially the same structure and function as the reference protein, where only changes in amino acids sequence that do not materially affect the polypeptide function occur. When used for a protein or an amino acid sequence the percentage of identity between the substantially similar and the reference protein or amino acid sequence is at least 30%, or at least 40%, 50%, 60%, 70%, 80%, 85%, or 90%, or at least 95%, or at least 99% with every individual number falling within this range of at least 30% to at least 99% also being part of the presently disclosed subject matter, using default GAP analysis parameters with the GCG Wisconsin Package SEQWEB® application of GAP, based on the algorithm of Needleman & Wunsch, 1970.

[0246] In one embodiment, the polypeptide is involved in a function such as abiotic stress tolerance, disease resistance, enhanced yield or nutritional quality or composition. In one embodiment, the polypeptide is involved in drought resistance.

[0247] In one embodiment, isolated polypeptides comprise the amino acid sequences set forth in even numbered SEQ ID NOs: 2-192, and variants having conservative amino acid modifications. The term “conservative modified variants” refers to polypeptides that can be encoded by nucleic acid sequences having degenerate codon substitutions wherein at least one position of one or more selected (or all) codons is substituted with mixed-base and/or deoxyinosine residues (Batzer et al., 1991; Ohtsuka et al., 1985; Rossolini et al., 1994). Additionally, one skilled in the art will recognize that individual substitutions, deletions, or additions to a nucleic acid, peptide, polypeptide, or polypeptide sequence that alters, adds, or deletes a single amino acid or a small percentage of amino acids in the encoded sequence is a “conservative modification” where the modification results in the substitution of an amino acid with a chemically similar amino acid. Conservative modified variants provide similar biological activity as the unmodified polypeptide. Conservative substitution tables listing functionally similar amino acids are known in the art. See Creighton, 1984.

[0248] The term “conservatively modified variant” also refers to a peptide having an amino acid residue sequence substantially similar to a sequence of a polypeptide of the presently disclosed subject matter in which one or more residues have been conservatively substituted with a functionally similar residue. Examples of conservative substitutions include the substitution of one non-polar (hydrophobic) residue such as isoleucine, valine, leucine or methionine for another; the substitution of one polar (hydrophilic) residue for another such as between arginine and lysine, between glutamine and asparagine, between glycine and serine; the substitution of one basic residue such as lysine, arginine or histidine for another; or the substitution of one acidic residue, such as aspartic acid or glutamic acid for another.

[0249] Amino acid substitutions, such as those which might be employed in modifying the polypeptides described herein, are generally based on the relative similarity of the amino acid side-chain substituents, for example, their hydrophobicity, hydrophilicity, charge, size, and the like. An analysis of the size, shape and type of the amino acid side-chain substituents reveals that arginine, lysine and histidine are all positively charged residues; that alanine, glycine and serine are all of similar size; and that phenylalanine, tryptophan and tyrosine all have a generally similar shape. Therefore, based upon these considerations, arginine, lysine and histidine; alanine, glycine and serine; and phenylalanine, tryptophan and tyrosine; are defined herein as biologically functional equivalents. Other biologically functionally equivalent changes will be appreciated by those of skill in the art.

[0250] In making biologically functional equivalent amino acid substitutions, the hydropathic index of amino acids can be considered. Each amino acid has been assigned a hydropathic index on the basis of their hydrophobicity and charge characteristics, these are: isoleucine (+4.5); valine (+4.2); leucine (+3.8); phenylalanine (+2.8); cysteine (+2.5); methionine (+1.9); alanine (+1.8); glycine (−0.4); threonine (−0.7); serine (−0.8); tryptophan (−0.9); tyrosine (−1.3); proline (−1.6); histidine (−3.2); glutamate (−3.5); glutamine (−3.5); aspartate (−3.5); asparagine (−3.5); lysine (−3.9); and arginine (−4.5).

[0251] The importance of the hydropathic amino acid index in conferring interactive biological function on a protein is generally understood in the art (Kyte & Doolittle, 1982, incorporated herein by reference). It is known that certain amino acids can be substituted for other amino acids having a similar hydropathic index or score and still retain a similar biological activity. Substitutions of amino acids involve amino acids for which the hydropathic indices are in one embodiment within ±2 of the original value, in another embodiment within ±1 of the original value, and in still another embodiment within ±0.5 of the original value in making changes based upon the hydropathic index.

[0252] It is also understood in the art that the substitution of like amino acids can be made effectively on the basis of hydrophilicity. U.S. Pat. No. 4,554,101, incorporated herein by reference, states that the greatest local average hydrophilicity of a protein, as governed by the hydrophilicity of its adjacent amino acids, correlates with its immunogenicity and antigenicity, i.e. with a biological property of the protein. It is understood that an amino acid can be substituted for another having a similar hydrophilicity value and still obtain a biologically equivalent protein.

[0253] As detailed in U.S. Pat. No. 4,554,101, the following hydrophilicity values have been assigned to amino acid residues: arginine (+3.0); lysine (+3.0); aspartate (+3.0±1); glutamate (+3.0±1); serine (+0.3); asparagine (+0.2); glutamine (+0.2); glycine (0); threonine (−0.4); proline (−0.5±1); alanine (−0.5); histidine (−0.5); cysteine (−1.0); methionine (−1.3); valine (−1.5); leucine (−1.8); -isoleucine (−1.8); tyrosine (−2.3); phenylalanine (−2.5); tryptophan (−3.4).

[0254] Substitutions of amino acids involve amino acids for which the hydrophilicity values are in one embodiment within ±2 of the original value, in another embodiment within ±1 of the original value, and in still another embodiment within ±0.5 of the original value in making changes based upon similar hydrophilicity values.

[0255] While discussion has focused on functionally equivalent polypeptides arising from amino acid changes, it will be appreciated that these changes can be effected by alteration of the encoding DNA, taking into consideration also that the genetic code is degenerate and that two or more codons can code for the same amino acid.

[0256] In one embodiment, the polypeptide is expressed in a specific location or tissue of a plant. In one embodiment, the location or tissue includes, but is not limited to, epidermis, vascular tissue, meristem, cambium, cortex, or pith. In another embodiment, the location or tissue is leaf or sheath, root, flower, and developing ovule or seed. In another embodiment, the location or tissue can be, for example, epidermis, root, vascular tissue, meristem, cambium, cortex, pith, leaf, or flower. In yet another embodiment, the location or tissue is a seed.

[0257] The polypeptides of the presently disclosed subject matter, fragments thereof, or variants thereof, can comprise any number of contiguous amino acid residues from a polypeptide of the presently disclosed subject matter, wherein the number of residues is selected from the group of integers consisting of from 10 to the number of residues in a full-length polypeptide of the presently disclosed subject matter. In one embodiment, the portion or fragment of the polypeptide is a functional polypeptide. The presently disclosed subject matter includes active polypeptides having specific activity of at least in one embodiment 20%, in another embodiment 30%, in another embodiment 40%, in another embodiment 50%, in another embodiment 60%, in another embodiment 70%, in another embodiment 80%, in another embodiment 90%, and in still another embodiment 95% that of the native (non-synthetic) endogenous polypeptide. Further, the substrate specificity (k_{cat}/Kₘ) can be substantially similar to the native (non-synthetic), endogenous polypeptide. Typically the Kₘ will be at least in one embodiment 30%, in another embodiment 40%, in another embodiment 50% of the native, endogenous polypeptide; and in another embodiment at least 60%, in another embodiment 70%, in another embodiment 80%, and in yet another embodiment 90% of the native, endogenous polypeptide. Methods of assaying and quantifying measures of activity and substrate specificity are well known to those of skill in the art.

[0258] The isolated polypeptides of the presently disclosed subject matter can elicit production of an antibody specifically reactive to a polypeptide of the presently disclosed subject matter when presented as an immunogen. Therefore, the polypeptides of the presently disclosed subject matter can be employed as immunogens for constructing antibodies immunoreactive to a polypeptide of the presently disclosed subject matter for such purposes including, but not limited to, immunoassays or polypeptide purification techniques. Immunoassays for determining binding are well known to those of skill in the art and include, but are not limited to, enzyme-linked immunosorbent assays (ELISAs) and competitive immunoassays.

IV. The Yeast Two-Hybrid System

[0259] The yeast two-hybrid system is a well known system which is based on the finding that most eukaryotic transcription activators are modular (see e.g., Gyuris et al., 1993; Bartel & Fields, 1997; Feys et al., 2001). The yeast two-hybrid system uses: 1) a plasmid that directs the synthesis of a “bait” (a known protein which is brought to the yeast's DNA by being fused to a DNA binding domain); 2) one or more reporter genes (“reporters”) with upstream binding, sites for the bait; and 3) a plasmid that directs the synthesis of proteins fused to activation domains and other useful moieties (“activation tagged proteins”, or “prey”).

[0260] In all of the Examples described below, an automated, high-throughput yeast two-hybrid assay technology (provided by Myriad Genetics Inc., Salt Lake City, Utah, United States of America) was used to search for protein interactions with the bait proteins. Briefly, the target protein (e.g., OsE2F1) was expressed in yeast as a fusion to the DNA-binding domain of the yeast Ga14p polypeptide. DNA encoding the target protein or a fragment of this protein was amplified from cDNA by PCR or prepared from an available clone. The resulting DNA fragment was cloned by ligation or recombination into a DNA-binding domain vector (e.g., pGBT9, PGBT.C, pAS2-1) such that an in-frame fusion between the Ga14p and target protein sequences was created. The resulting construct, the target gene construct, was introduced by transformation into a haploid yeast strain.

[0261] A screening protocol was then used to search the individual baits against two activation domain libraries of assorted peptide motifs of greater than five million cDNA clones. The libraries were derived from RNA isolated from leaves, stems, and roots of rice plants grown in normal conditions, plus tissues from plants exposed to various stresses (input trait library), and from various seed stages, callus, and early and late panicle (output trait library). To screen, a library of activation domain fusions (i.e., O. saliva cDNA cloned into an activation domain vector) was introduced by transformation into a haploid yeast strain of the opposite mating type. The yeast strain that carried the activation domain constructs contained one or more Ga14p-responsive reporter genes, the expression of which can be monitored. Non-limiting examples of some yeast reporter strains include Y190, PJ69, and CBY14a.

[0262] Yeast carrying the target gene construct was combined with yeast carrying the activation domain library. The two yeast strains mated to form diploid yeast and were plated on media that selected for expression of one or more Ga14p-responsive reporter genes. Thus, both hybrid proteins (i.e., the target “bait” protein and the activation domain “prey” protein) were expressed in a yeast reporter strain where an interaction between the test proteins results in transcription of the reporter genes TRP1 and LEU2, allowing growth on selective medium lacking tryptophan and leucine. Colonies that arose after incubation were selected for further characterization. The activation domain plasmid was isolated from each colony obtained in the two-hybrid search. The sequence of the insert in this construct was obtained by sequence analysis (e.g., Sanger's dideoxy nucleotide chain termination method; see Ausubel et al., 1988, including updates up to 2002). Thus, the identity of positives obtained from these searches was determined by sequence analysis against proprietary and public (e.g., GENBANK®) nucleic acid and protein databases.

[0263] Interaction of the activation domain fusion with the target protein was confirmed by testing for the specificity of the interaction. The activation domain construct was co-transformed into a yeast reporter strain with either the original target protein construct or a variety of other DNA-binding domain constructs. Expression of the reporter genes in the presence of the target protein but not with other test proteins indicated that the interaction was genuine.

[0264] To further characterize the genes encoding the interacting proteins, the nucleic acid sequences of the baits and preys were compared with nucleic acid sequences present on Torrey Mesa Research Institute (TMRI)'s proprietary GENECHIP® Rice Genome Array (Affymetrix, Santa Clara, Calif., United States of America; see Zhu et al., 2001). The rice genome array contained 25-mer oligonucleotide probes with sequences corresponding to the 3′ ends of 21,000 predicted open reading frames found in approximately 42,000 contigs that make up the rice genome map (see Goff et al., 2002). Sixteen different probes were used to measure the expression level of each nucleic acid. The sequences of the probes are available at http://tmri.org/gene_exp_web/. The calculated expression value was determined based on the observed expression level minus the noise background associated with each probe. Experiments included evaluating the differential gene expression from various plant tissues comprising seed, root, leaf and stem, panicle, and pollen. Gene expression was also measured in plants exposed to environmental cold (i.e., 14° C.), osmotic pressure (growth media supplemented with 260 mM mannitol), drought (media supplemented with 25% polyethylene glycol 8000), salt (media supplemented with 150 mM NaCl), abscisic acid (ABA)-inducible stresses (media supplemented with 50 uM ABA; see Chen et al., 2002), infection by the fungal pathogen Magnaporthe grisea, and treatment with plant hormones (jasmonic acid (JA; 100 μM), gibberellin (GA3; 50 μM), and abscisic acid) and with herbicides benzylamino purine (BAP; 10 μM), 2,4-dichlorophenoxyacetic acid (2,4-D; 2 mg/l), and BL2 (10 μM)).

[0265] Many of the cell proliferation-related proteins of the presently disclosed subject matter interact with one another.

V. Controlling and Modulating the Expression of Nucleic Acid Molecules

A. General Considerations

[0266] One aspect of the presently disclosed subject matter provides compositions and methods for modulating (i.e. increasing or decreasing) the level of nucleic acid molecules and/or polypeptides of the presently disclosed subject matter in plants. In particular, the nucleic acid molecules and polypeptides of the presently disclosed subject matter are expressed constitutively, temporally, or spatially (e.g., at developmental stages), in certain tissues, and/or quantities, which are uncharacteristic of non-recombinantly engineered plants. Therefore, the presently disclosed subject matter provides utility in such exemplary applications as altering the specified characteristics identified above.

[0267] The isolated nucleic acid molecules of the presently disclosed subject matter are useful for expressing a polypeptide of the presently disclosed subject matter in a recombinantly engineered cell such as a bacterial, yeast, insect, mammalian, or plant cell. Expressing cells can produce the polypeptide in a non-natural condition (e.g., in quantity, composition, location and/or time) because they have been genetically altered to do so. Those skilled in the art are knowledgeable in the numerous expression systems available for expression of nucleic acids encoding a polypeptide of the presently disclosed subject matter.

[0268] In another aspect, the presently disclosed subject matter features a cell proliferation-related polypeptide encoded by a nucleic acid molecule disclosed herein. In certain embodiments, the cell proliferation-related polypeptide is isolated.

[0269] The presently disclosed subject matter further provides a method for modifying (i.e. increasing or decreasing) the concentration or composition of a polypeptide of the presently disclosed subject matter in a plant or part thereof. Modification can be effected by increasing or decreasing the concentration and/or the composition (i.e. the ration of the polypeptides of the presently disclosed subject matter) in a plant. The method comprises introducing into a plant cell an expression cassette comprising a nucleic acid molecule of the presently disclosed subject matter as disclosed above to obtain a transformed plant cell or tissue, and culturing the transformed plant cell or tissue. The nucleic acid molecule can be under the regulation of a constitutive or inducible promoter. The method can further comprise inducing or repressing expression of a nucleic acid molecule of a sequence in the plant for a time sufficient to modify the concentration and/or composition in the plant or plant part.

[0270] A plant or plant part having modified expression of a nucleic acid molecule of the presently disclosed subject matter can be analyzed and selected using methods known to those skilled in the art including, but not limited to, Southern blotting, DNA sequencing, or PCR analysis using primers specific to the nucleic acid molecule and detecting amplicons produced therefrom.

[0271] In general, a concentration or composition is increased or decreased by at least in one embodiment 5%, in another embodiment 10%, in another embodiment 20%, in another embodiment 30%, in another embodiment 40%, in another embodiment 50%, in another embodiment 60%, in another embodiment 70%, in another embodiment 80%, and in still another embodiment 90% relative to a native control plant, plant part, or cell lacking the expression cassette.

B. Modulation of Expression of Nucleic Acid Molecules

[0272] The compositions of the presently disclosed subject matter include plant nucleic acid molecules, and the amino acid sequences of the polypeptides or partial-length polypeptides encoded by nucleic acid molecules comprising an open reading frame. These sequences can be employed to alter the expression of a particular gene corresponding to the open reading frame by decreasing or eliminating expression of that plant gene or by overexpressing a particular gene product. Methods of this embodiment of the presently disclosed subject matter include stably transforming a plant with a nucleic acid molecule of the presently disclosed subject matter that includes an open reading frame operatively linked to a promoter capable of driving expression of that open reading frame (sense or antisense) in a plant cell. By “portion” or “fragment”, as it relates to a nucleic acid molecule that comprises an open reading frame or a fragment thereof encoding a partial-length polypeptide having the activity of the full length polypeptide, is meant a sequence having in one embodiment at least 80 nucleotides, in another embodiment at least 150 nucleotides, and in still another embodiment at least 400 nucleotides. If not employed for expression, a “portion” or “fragment” means in representative embodiments at least 9, or 12, or 15, or at least 20, consecutive nucleotides (e.g., probes and primers or other oligonucleotides) corresponding to the nucleotide sequence of the nucleic acid molecules of the presently disclosed subject matter. Thus, to express a particular gene product, the method comprises introducing into a plant, plant cell, or plant tissue an expression cassette comprising a promoter operatively linked to an open reading frame so as to yield a transformed differentiated plant, transformed cell, or transformed tissue. Transformed cells or tissue can be regenerated to provide a transformed differentiated plant. The transformed differentiated plant or cells thereof can express the open reading frame in an amount that alters the amount of the gene product in the plant or cells thereof, which product is encoded by the open reading frame. The presently disclosed subject matter also provides a transformed plant prepared by the methodsa disclosed herein, as well as progeny and seed thereof.

[0273] The presently disclosed subject matter further includes a nucleotide sequence that is complementary to one (hereinafter “test” sequence) that hybridizes under stringent conditions to a nucleic acid molecule of the presently disclosed subject matter, as well as an RNA molecule that is transcribed from the nucleic acid molecule. When hybridization is performed under stringent conditions, either the test or nucleic acid molecule of presently disclosed subject matter can be present on a support: e.g., on a membrane or on a DNA chip. Thus, either a denatured test or nucleic acid molecule of the presently disclosed subject matter is first bound to a support and hybridization is effected for a specified period of time at a temperature of, in one embodiment, between 55° C. and 70° C., in 2×SSC containing 0.1% SDS, followed by rinsing the support at the same temperature but with a buffer having a reduced SSC concentration. Depending upon the degree of stringency required, such reduced concentration buffers are typically 1×SSC containing 0.1% SDS, 0.5×SSC containing 0.1% SDS, or 0.1×SSC containing 0.1% SDS.

[0274] In a further embodiment, the presently disclosed subject matter provides a transformed plant host cell, or one obtained through breeding, capable of over-expressing, under-expressing, or having a knockout of a polypeptide-encoding gene and/or its gene product(s). The plant cell is transformed with at least one such expression vector wherein the plant host cell can be used to regenerate plant tissue or an entire plant, or seed there from, in which the effects of expression, including overexpression and underexpression, of the introduced sequence or sequences can be measured in vitro or in planta.

[0275] In another aspect, the presently disclosed subject matter features an isolated cell proliferation-related polypeptide, wherein the polypeptide binds to a fragment of a protein selected from the group consisting of OsE2F1, Os018989-4003, OsE2F2, OsS49462, OsCYCOS2, OsMADS45, OsRAP1B, OsMADS6, OsFDRMADS8, OsMADS3, OsMADS5, OsMADS15, OsHOS59, OsGF14-c, OsDAD1, Os006819-2510, OsCRTC, OsSGT1, OsPN31085, OsCHIB1, OsCS, OsPP2A-2, and OsCAA90866. In some embodiments, the presently disclosed subject matter features an isolated polypeptide comprising or consisting of an amino acid sequence substantially similar to the amino acid sequence of an isolated cell proliferation-related polypeptide of the presently disclosed subject matter.

[0276] Because the proteins of the presently disclosed subject matter have a roll in cell proliferation, in certain embodiments, a cell introduced with a nucleic acid molecule of the presently disclosed subject matter has a different cell proliferation rate as compared to a cell not introduced with the nucleic acid molecule.

[0277] In another aspect, the presently disclosed subject matter features a method for modulating the proliferation of a plant cell comprising introducing an isolated nucleic acid molecule encoding a cell proliferation-related polypeptide into the plant cell, wherein the polypeptide binds to a fragment of a protein selected from the group consisting of OsE2F1, Os018989-4003, OsE2F2, OsS49462, OsCYCOS2, OsMADS45, OsRAP1B, OsMADS6, OsFDRMADS8, OsMADS3, OsMADS5, OsMADS15, OsHOS59, OsGF14-c, OsDAD1, Os006819-2510, OsCRTC, OsSGT1, OsERP, OsCHIB1, OsCS, OsPP2A-2, and OsCAA90866, wherein the polypeptide is expressed by the cell.

[0278] In another aspect, the presently disclosed subject matter features a method for modulating the proliferation of a plant cell comprising introducing an isolated nucleic acid molecule encoding a cell proliferation-related polypeptide into the plant cell, wherein the polypeptide binds to a fragment of a protein selected from the group consisting of OsE2F1, Os018989-4003, OsE2F2, OsS49462, OsCYCOS2, OsMADS45, OsRAP1B, OsMADS6, OsFDRMADS8, OsMADS3, OsMADS5, OsMADS15, OsHOS59, OsGF14-c, OsDAD1, Os006819-2510, OsCRTC, OsSGT1, OsERP, OsCHIB1, OsCS, OsPP2A-2, and OsCAA90866, wherein expression of the polypeptide encoded by the nucleic acid molecule is reduced in the cell.

[0279] As discussed herein, all of the cell proliferation-related proteins described herein affect cell proliferation, either under normal conditions, under adverse conditions (e.g., when the plant is exposed to biotic or abiotic stress), or when the plant is developing and differentiating. Accordingly, by changing the amount of a cell proliferation-related protein of the presently disclosed subject matter in a plant cell, the proliferation of that plant cell can be modulated.

[0280] In some situations, increasing expression of a cell proliferation-related protein of the presently disclosed subject matter in a cell will cause that cell to increase its rate of proliferation, either alone or in response to some stimulus (e.g., stress or growth hormone). In other situations, increasing expression of a cell proliferation-related protein of the presently disclosed subject matter in a cell causes that cell to reduce its rate of proliferation. Similarly, decreasing the expression of a cell proliferation-related protein of the presently disclosed subject matter in a cell can increase or decrease that cell's rate of proliferation. What is relevant is that the rate of proliferation of the cell changes if the level of expression of a cell proliferation-related protein of the presently disclosed subject matter is either increased or decreased.

[0281] Increasing the level of expression of a cell proliferation-related protein of the presently disclosed subject matter in a cell is a relatively simple matter. For example, overexpression of the protein can be accomplished by transforming the cell with a nucleic acid molecule encoding the protein according to standard methods such as those described above.

[0282] Reducing the level of expression of a cell proliferation-related protein of the presently disclosed subject matter in a cell is likewise simply accomplished using standard methods. For example, an antisense RNA or DNA oligonucleotide that is complementary to the sense strand (i.e., the mRNA strand) of a nucleic acid molecule encoding the protein can be administered to the cell to reduce expression of that protein in that cell (see e.g., Agrawal, 1993; U.S. Pat. No. 5,929,226).

[0283] The modulation in expression of the nucleic acid molecules of the presently disclosed subject matter can be achieved, for example, in one of the following ways:

[0284] 1. “Sense” Suppression

[0285] Alteration of the expression of a nucleotide sequence of the presently disclosed subject matter, in one embodiment reduction of its expression, is obtained by “sense” suppression (referenced in e.g., Jorgensen et al., 1996). In this case, the entirety or a portion of a nucleotide sequence of the presently disclosed subject matter is comprised in a DNA molecule. The DNA molecule can be operatively linked to a promoter functional in a cell comprising the target gene, in one embodiment a plant cell, and introduced into the cell, in which the nucleotide sequence is expressible. The nucleotide sequence is inserted in the DNA molecule in the “sense orientation”, meaning that the coding strand of the nucleotide sequence can be transcribed. In one embodiment, the nucleotide sequence is fully translatable and all the genetic information comprised in the nucleotide sequence, or portion thereof, is translated into a polypeptide. In another embodiment, the nucleotide sequence is partially translatable and a short peptide is translated. In one embodiment, this is achieved by inserting at least one premature stop codon in the nucleotide sequence, which brings translation to a halt. In another embodiment, the nucleotide sequence is transcribed but no translation product is made. This is usually achieved by removing the start codon, i.e. the “ATG”, of the polypeptide encoded by the nucleotide sequence. In a further embodiment, the DNA molecule comprising the nucleotide sequence, or a portion thereof, is stably integrated in the genome of the plant cell. In another embodiment, the DNA molecule comprising the nucleotide sequence, or a portion thereof, is comprised in an extrachromosomally replicating molecule.

[0286] In transgenic plants containing one of the DNA molecules disclosed immediately above, the expression of the nucleotide sequence corresponding to the nucleotide sequence comprised in the DNA molecule can be reduced. The nucleotide sequence in the DNA molecule in one embodiment is at least 70% identical to the nucleotide sequence the expression of which is reduced, in another embodiment is at least 80% identical, in another embodiment is at least 90% identical, in another embodiment is at least 95% identical, and in still another embodiment is at least 99% identical.

[0287] 2. “Antisense” Suppression

[0288] In another embodiment, the alteration of the expression of a nucleotide sequence of the presently disclosed subject matter, for example the reduction of its expression, is obtained by “antisense” suppression. The entirety or a portion of a nucleotide sequence of the presently disclosed subject matter is comprised in a DNA molecule. The DNA molecule can be operatively linked to a promoter functional in a plant cell, and introduced in a plant cell, in which the nucleotide sequence is expressible. The nucleotide sequence is inserted in the DNA molecule in the “antisense orientation”, meaning that the reverse complement (also called sometimes non-coding strand) of the nucleotide sequence can be transcribed. In one embodiment, the DNA molecule comprising the nucleotide sequence, or a portion thereof, is stably integrated in the genome of the plant cell. In another embodiment the DNA molecule comprising the nucleotide sequence, or a portion thereof, is comprised in an extrachromosomally replicating molecule. Several publications describing this approach are cited for further illustration (Green et al., 1986; van der Krol et al., 1991; Powell et al., 1989; Ecker & Davis, 1986).

[0289] In transgenic plants containing one of the DNA molecules disclosed immediately above, the expression of the nucleotide sequence corresponding to the nucleotide sequence comprised in the DNA molecule can be reduced. The nucleotide sequence in the DNA molecule is in one embodiment at least 70% identical to the nucleotide sequence the expression of which is reduced, in another embodiment at least 80% identical, in another embodiment at least 90% identical, in another embodiment at least 95% identical, and in still another embodiment at least 99% identical.

[0290] 3. Homologous Recombination

[0291] In another embodiment, at least one genomic copy corresponding to a nucleotide sequence of the presently disclosed subject matter is modified in the genome of the plant by homologous recombination as further illustrated in Paszkowski et al., 1988. This technique uses the ability of homologous sequences to recognize each other and to exchange nucleotide sequences between respective nucleic acid molecules by a process known in the art as homologous recombination. Homologous recombination can occur between the chromosomal copy of a nucleotide sequence in a cell and an incoming copy of the nucleotide sequence introduced in the cell by transformation. Specific modifications are thus accurately introduced in the chromosomal copy of the nucleotide sequence. In one embodiment, the regulatory elements of the nucleotide sequence of the presently disclosed subject matter are modified. Such regulatory elements are easily obtainable by screening a genomic library using the nucleotide sequence of the presently disclosed subject matter, or a portion thereof, as a probe. The existing regulatory elements are replaced by different regulatory elements, thus altering expression of the nucleotide sequence, or they are mutated or deleted, thus abolishing the expression of the nucleotide sequence. In another embodiment, the nucleotide sequence is modified by deletion of a part of the nucleotide sequence or the entire nucleotide sequence, or by mutation. Expression of a mutated polypeptide in a plant cell is also provided in the presently disclosed subject matter. Recent refinements of this technique to disrupt endogenous plant genes have been disclosed (Kempin et al., 1997 and Miao & Lam, 1995).

[0292] In one embodiment, a mutation in the chromosomal copy of a nucleotide sequence is introduced by transforming a cell with a chimeric oligonucleotide composed of a contiguous stretch of RNA and DNA residues in a duplex conformation with double hairpin caps on the ends. An additional feature of the oligonucleotide is for example the presence of 2′-O-methylation at the RNA residues. The RNA/DNA sequence is designed to align with the sequence of a chromosomal copy of a nucleotide sequence of the presently disclosed subject matter and to contain the desired nucleotide change. For example, this technique is further illustrated in U.S. Pat. No. 5,501,967 and Zhu et al., 1999.

[0293] 4. Ribozymes

[0294] In a further embodiment, an RNA coding for a polypeptide of the presently disclosed subject matter is cleaved by a catalytic RNA, or ribozyme, specific for such RNA. The ribozyme is expressed in transgenic plants and results in reduced amounts of RNA coding for the polypeptide of the presently disclosed subject matter in plant cells, thus leading to reduced amounts of polypeptide accumulated in the cells. This method is further illustrated in U.S. Pat. No. 4,987,071.

[0295] 5. Dominant-Negative Mutants

[0296] In another embodiment, the activity of a polypeptide encoded by the nucleotide sequences of the presently disclosed subject matter is changed. This is achieved by expression of dominant negative mutants of the polypeptides in transgenic plants, leading to the loss of activity of the endogenous polypeptide.

[0297] 6. Aptamers

[0298] In a further embodiment, the activity of polypeptide of the presently disclosed subject matter is inhibited by expressing in transgenic plants nucleic acid ligands, so-called aptamers, which specifically bind to the polypeptide. Aptamers can be obtained by the SELEX (Systematic Evolution of Ligands by Exponential Enrichment) method. In the SELEX method, a candidate mixture of single stranded nucleic acids having regions of randomized sequence is contacted with the polypeptide and those nucleic acids having an increased affinity to the target are partitioned from the remainder of the candidate mixture. The partitioned nucleic acids are amplified to yield a ligand-enriched mixture. After several iterations a nucleic acid with optimal affinity to the polypeptide is obtained and is used for expression in transgenic plants. This method is further illustrated in U.S. Pat. No. 5,270,163.

[0299] 7. Zinc Finger Polypeptides

[0300] A zinc finger polypeptide that binds a nucleotide sequence of the presently disclosed subject matter or to its regulatory region can also be used to alter expression of the nucleotide sequence. In alternative embodiments, transcription of the nucleotide sequence is reduced or increased. Zinc finger polypeptides are disclosed in, for example, Beerli et al., 1998, or in WO 95/19431, WO 98/54311, or WO 96/06166, all incorporated herein by reference in their entirety.

[0301] 8. dsRNA

[0302] Alteration of the expression of a nucleotide sequence of the presently disclosed subject matter can also be obtained by double stranded RNA (dsRNA) interference (RNAi) as disclosed, for example, in WO 99/32619, WO 99/53050, or WO 99/61631, all incorporated herein by reference in their entireties. In one embodiment, the alteration of the expression of a nucleotide sequence of the presently disclosed subject matter, in one embodiment the reduction of its expression, is obtained by dsRNA interference. The entirety, or in one embodiment a portion, of a nucleotide sequence of the presently disclosed subject matter, can be comprised in a DNA molecule. The size of the DNA molecule is in one embodiment from 100 to 1000 nucleotides or more; the optimal size to be determined empirically. Two copies of the identical DNA molecule are linked, separated by a spacer DNA molecule, such that the first and second copies are in opposite orientations. In one embodiment, the first copy of the DNA molecule is the reverse complement (also known as the non-coding strand) and the second copy is the coding strand; in another embodiment, the first copy is the coding strand, and the second copy is the reverse complement. The size of the spacer DNA molecule is in one embodiment 200 to 10,000 nucleotides, in another embodiment 400 to 5000 nucleotides, and in yet another embodiment 600 to 1500 nucleotides in length. The spacer is in one embodiment a random piece of DNA, in another embodiment a random piece of DNA without homology to the target organism for dsRNA interference, and in still another embodiment a functional intron that is effectively spliced by the target organism. The two copies of the DNA molecule separated by the spacer are operatively linked to a promoter functional in a plant cell, and introduced in a plant cell in which the nucleotide sequence is expressible. In one embodiment, the DNA molecule comprising the nucleotide sequence, or a portion thereof, is stably integrated in the genome of the plant cell. In another embodiment, the DNA molecule comprising the nucleotide sequence, or a portion thereof, is comprised in an extrachromosomally replicating molecule. Several publications describing this approach are cited for further illustration (Waterhouse et al., 1998; Chuang & Meyerowitz, 2000; Smith et al., 2000).

[0303] In another non-limiting example, RNA interference (RNAi) or post-transcriptional gene silencing (PTGS) can be employed to reduce the level of expression of a cell proliferation-related protein of the presently disclosed subject matter in a cell. As used herein, the terms “RNA interference” and “post-transcriptional gene silencing” are used interchangeably and refer to a process of sequence-specific modulation of gene expression mediated by a small interfering RNA (siRNA; see generally Fire et al., 1998), resulting in null or hypomorphic phenotypes. Thus, because described herein are nucleotide sequences encoding the cell proliferation-related proteins of the presently disclosed subject matter, RNAi can be readily designed. Indeed, constructs encoding an RNAi molecule have been developed which continuously synthesize an RNAi molecule, resulting in prolonged repression of expression of the targeted gene (Brummelkamp et al., 2002).

[0304] In transgenic plants containing one of the DNA molecules disclosed immediately above, the expression of the nucleotide sequence corresponding to the nucleotide sequence comprised in the DNA molecule is in one embodiment reduced. In one embodiment, the nucleotide sequence in the DNA molecule is at least 70% identical to the nucleotide sequence the expression of which is reduced, in another embodiment it is at least 80% identical, in another embodiment it is at least 90% identical, in another embodiment it is at least 95% identical, and in still another embodiment it is at least 99% identical.

[0305] 9. Insertion of a DNA Molecule (Insertional Mutagenesis)

[0306] In one embodiment, a DNA molecule is inserted into a chromosomal copy of a nucleotide sequence of the presently disclosed subject matter, or into a regulatory region thereof. In one embodiment, such DNA molecule comprises a transposable element capable of transposition in a plant cell, such as, for example, Ac/Ds, Em/Spm, mutator. Alternatively, the DNA molecule comprises a T-DNA border of an Agrobacterium T-DNA. The DNA molecule can also comprise a recombinase or integrase recognition site that can be used to remove part of the DNA molecule from the chromosome of the plant cell. Methods of insertional mutagenesis using T-DNA, transposons, oligonucleotides, or other methods known to those skilled in the art are also encompassed. Methods of using T-DNA and transposon for insertional mutagenesis are disclosed in Winkler & Feldmann, 1989, and Martienssen, 1998, incorporated herein by reference in their entireties.

[0307] 10. Deletion Mutagenesis

[0308] In yet another embodiment, a mutation of a nucleic acid molecule of the presently disclosed subject matter is created in the genomic copy of the sequence in the cell or plant by deletion of a portion of the nucleotide sequence or regulator sequence. Methods of deletion mutagenesis are known to those skilled in the art. See e.g., Miao & Lam, 1995.

[0309] In yet another embodiment, a deletion is created at random in a large population of plants by chemical mutagenesis or irradiation and a plant with a deletion in a gene of the presently disclosed subject matter is isolated by forward or reverse genetics. Irradiation with fast neutrons or gamma rays is known to cause deletion mutations in plants (Silverstone et al., 1998; Bruggemann et al., 1996; Redei & Koncz, 1992). Deletion mutations in a gene of the presently disclosed subject matter can be recovered in a reverse genetics strategy using PCR with pooled sets of genomic DNAs as has been shown in C. elegans (Liu et al., 1999). A forward genetics strategy involves mutagenesis of a line bearing a trait of interest followed by screening the M2 progeny for the absence of the trait. Among these mutants would be expected to be some that disrupt a gene of the presently disclosed subject matter. This could be assessed by Southern blotting or PCR using primers designed for a gene of the presently disclosed subject matter with genomic DNA from these mutants.

[0310] 11. Overexpression in a Plant Cell

[0311] In yet another embodiment, a nucleotide sequence of the presently disclosed subject matter encoding a polypeptide is overexpressed. Examples of nucleic acid molecules and expression cassettes for over-expression of a nucleic acid molecule of the presently disclosed subject matter are disclosed above. Methods known to those skilled in the art of over-expression of nucleic acid molecules are also encompassed by the presently disclosed subject matter.

[0312] In one embodiment, the expression of the nucleotide sequence of the presently disclosed subject matter is altered in every cell of a plant. This can be obtained, for example, though homologous recombination or by insertion into a chromosome. This can also be obtained, for example, by expressing a sense or antisense RNA, zinc finger polypeptide or ribozyme under the control of a promoter capable of expressing the sense or antisense RNA, zinc finger polypeptide, or ribozyme in every cell of a plant. Constitutive, inducible, tissue-specific, cell type-specific, or developmentally-regulated expression are also within the scope of the presently disclosed subject matter and result in a constitutive, inducible, tissue-specific, or developmentally-regulated alteration of the expression of a nucleotide sequence of the presently disclosed subject matter in the plant cell. Constructs for expression of the sense or antisense RNA, zinc finger polypeptide, or ribozyme, or for over-expression of a nucleotide sequence of the presently disclosed subject matter, can be prepared and transformed into a plant cell according to the teachings of the presently disclosed subject matter, for example, as disclosed herein;

[0313] C. Construction of Plant Expression Vectors

[0314] Further encompassed within the presently disclosed subject matter is a recombinant vector comprising an expression cassette according to the embodiments of the presently disclosed subject matter. Also encompassed are plant cells comprising expression cassettes according to the present disclosure, and plants comprising these plant cells. In one embodiment, the plant is a dicot. In another embodiment, the plant is a gymnosperm. In another embodiment, the plant is a monocot. In one embodiment, the monocot is a cereal. In one embodiment, the cereal is, for example, maize, wheat, barley, oats, rye, millet, sorghum, triticale, secale, einkom, spelt, emmer, teff, milo, flax, gramma grass, Tripsacum or teosinte. In another embodiment, the cereal is sorghum.

[0315] In one embodiment, the expression cassette is expressed throughout the plant. In another embodiment, the expression cassette is expressed in a specific location or tissue of a plant. In one embodiment, the location or tissue includes, but is not limited to, epidermis, root, vascular tissue, meristem, cambium, cortex, pith, leaf, flower, and combinations thereof. In another embodiment, the location or tissue is a seed.

[0316] In one embodiment, the expression cassette is involved in a function including, but not limited to, disease resistance, yield, biotic or abiotic stress resistance, nutritional quality, carbon metabolism, photosynthesis, signal transduction, cell growth, reproduction, disease processes (for example, pathogen resistance), gene regulation, and differentiation. In one embodiment, the polypeptide is involved in a function such as biotic or abiotic stress tolerance, enhanced yield or proliferation, disease resistance, or nutritional composition.

[0317] For example, a nucleic acid molecule of the presently disclosed subject matter can be introduced, under conditions for expression, into a host cell such that the host cell transcribes and translates the nucleic acid molecule to produce a cell proliferation-related polypeptide. By “under conditions for expression” is meant that a nucleic acid molecule is positioned in the cell such that it will be expressed in that cell. For example, a nucleic acid molecule can be located downstream of a promoter that is active in the cell, such that the promoter will drive the expression of the polypeptide encoded for by the nucleic acid molecule in the cell. Any regulatory sequence (e.g., promoter, enhancer, inducible promoter) can be linked to the nucleic acid molecule; alternatively, the nucleic acid molecule can include its own regulatory sequence(s) such that it will be expressed (i.e., transcribed and/or translated) in a cell.

[0318] Where the nucleic acid molecule of the presently disclosed subject matter is introduced into a cell under conditions of expression, that nucleic acid molecule can be included in an expression cassette. Thus, the presently disclosed subject matter further provides a host cell comprising an expression cassette comprising a nucleic acid molecule encoding a cell proliferation-related polypeptide as disclosed herein. Such an expression cassette can include, in addition to the nucleic acid molecule encoding a cell proliferation-related polypeptide of the presently disclosed subject matter, at least one regulatory sequence (e.g., a promoter and/or an enhancer).

[0319] As such, coding sequences intended for expression in transgenic plants can be first assembled in expression cassettes operatively linked to a suitable promoter expressible in plants. The expression cassettes can also comprise any further sequences required or selected for the expression of the transgene. Such sequences include, but are not limited to, transcription terminators, extraneous sequences to enhance expression such as introns, vital sequences, and sequences intended for the targeting of the gene product to specific organelles and cell compartments. These expression cassettes can then be easily transferred to the plant transformation vectors disclosed below. The following is a description of various components of typical expression cassettes.

[0320] 1. Promoters

[0321] The selection of the promoter used in expression cassettes can determine the spatial and temporal expression pattern of the transgene in the transgenic plant. Selected promoters can express transgenes in specific cell types (such as leaf epidermal cells, mesophyll cells, root cortex cells) or in specific tissues or organs (roots, leaves, or flowers, for example) and the selection can reflect the desired location for accumulation of the gene product. Alternatively, the selected promoter can drive expression of the gene under various inducing conditions. Promoters vary in their strength; i.e., their abilities to promote transcription. Depending upon the host cell system utilized, any one of a number of suitable promoters can be used, including the gene's native promoter. The following are non-limiting examples of promoters that can be used in expression cassettes.

[0322] In one non-limiting example, a plant promoter fragment can be employed that will direct expression of the gene in all tissues of a regenerated plant. Such promoters are referred to herein as “constitutive” promoters and are active under most environmental conditions and states of development or cell differentiation. Examples of constitutive promoters include the cauliflower mosaic virus (CaMV) 35S transcription initiation region, the 1′- or 2′-promoter derived from T-DNA of Agrobacterium tumefaciens, and other transcription initiation regions from various plant genes known to those of ordinary skill in the art. Such genes include for example, the AP2 gene, ACT11 from Arabidopsis (Huang et al., 1996), Cat3 from Arabidopsis (GENBANK® Accession No. U43147; Zhong et al., 1996), the gene encoding stearoyl-acyl carrier protein desaturase from Brassica napus (GENBANK® Accession No. X74782; Solocombe et al., 1994), GPc1 from maize (BENBANK® Accession No. X15596; Martinez et al., 1989), and Gpc2 from maize (GENBANK® Accession No. U45855; Manjunath et al., 1997).

[0323] Alternatively, the plant promoter can direct expression of the nucleic acid molecules of the presently disclosed subject matter in a specific tissue or can be otherwise under more precise environmental or developmental control. Examples of environmental conditions that can effect transcription by inducible promoters include anaerobic conditions, elevated temperature, or the presence of light. Such promoters are referred to herein as “inducible”, “cell type-specific”, or “tissue-specific” promoters. Ordinary skill in the art will recognize that a tissue-specific promoter can drive expression of operatively linked sequences in tissues other than the target tissue. Thus, as used herein a tissue-specific promoter is one that drives expression preferentially in the target tissue, but can also lead to some expression in other tissues as well.

[0324] Examples of promoters under developmental control include promoters that initiate transcription only (preferentially) in certain tissues, such as fruit, seeds, or flowers. Promoters that direct expression of nucleic acids in ovules, flowers, or seeds are particularly useful in the presently disclosed subject matter. As used herein a seed-specific or preferential promoter is one that directs expression specifically or preferentially in seed tissues. Such promoters can be, for example, ovule-specific, embryo-specific, endosperm-specific, integument-specific, seed coat-specific, or some combination thereof. Examples include a promoter from the ovule-specific BEL1 gene described in Reiser et al., 1995 (GENBANK® Accession No. U39944). Non-limiting examples of seed specific promoters are derived from the following genes: MAC1 from maize (Sheridan et al., 1996), Cat3 from maize (GENBANK® Accession No. L05934; Abler et al., 1993), the gene encoding oleosin 18 kD from maize (GENBANK® Accession No. J05212; Lee et al., 1994), vivparous-1 from Arabidopsis (GENBANK® Accession No. U93215), the gene encoding oleosin from Arabidopsis (GENBANK® Accession No. Z17657), Atmycl from Arabidopsis (Urao et al., 1996), the 2s seed storage protein gene family from Arabidopsis (Conceicao et al., 1994) the gene encoding oleosin 20 kD from Brassica napus (GENBANK® Accession No. M63985), napA from Brassica napus (GENBANK® Accession No. J02798; Josefsson et al., 1987), the napin gene family from Brassica napus (Sjodahl et al., 1995), the gene encoding the 2S storage protein from Brassica napus (Dasgupta et al., 1993), the genes encoding oleosin A (GENBANK® Accession No. U09118) and oleosin B (GENBANK® Accession No. U09119) from soybean, and the gene encoding low molecular weight sulphur rich protein from soybean (Choi et al., 1995).

[0325] Alternatively, particular sequences that provide the promoter with desirable expression characteristics, or the promoter with expression enhancement activity, could be identified and these or similar sequences introduced into the sequences via cloning or via mutation. It is further contemplated that these sequences can be mutagenized in order to enhance the expression of transgenes in a particular species.

[0326] Furthermore, it is contemplated that promoters combining elements from more than one promoter can be employed. For example, U.S. Pat. No. 5,491,288 discloses combining a Cauliflower Mosaic Virus (CaMV) promoter with a histone promoter. Thus, the elements from the promoters disclosed herein can be combined with elements from other promoters.

[0327] a. Constitutive Expression: the Ubiquitin Promoter

[0328] Ubiquitin is a gene product known to accumulate in many cell types and its promoter has been cloned from several species for use in transgenic plants (e.g., sunflower—Binet et al., 1991; maize—Christensen et al., 1989; and Arabidopsis—Callis et al., 1990; Norris et al., 1993). The maize ubiquitin promoter has been developed in transgenic monocot systems and its sequence and vectors constructed for monocot transformation are disclosed in the patent publication EP 0 342 926 (to Lubrizol) which is herein incorporated by reference. Taylor et al., 1993, describes a vector (pAHC25) that comprises the maize ubiquitin promoter and first intron and its high activity in cell suspensions of numerous monocotyledons when introduced via microprojectile bombardment. The Arabidopsis ubiquitin promoter is suitable for use with the nucleotide sequences of the presently disclosed subject matter. The ubiquitin promoter is suitable for gene expression in transgenic plants, both monocotyledons and dicotyledons. Suitable vectors are derivatives of pAHC25 or any of the transformation vectors disclosed herein, modified by the introduction of the appropriate ubiquitin promoter and/or intron sequences.

[0329] b. Constitutive Expression: the CaMV 35S Promoter

[0330] Construction of the plasmid pCGN1761 is disclosed in the published patent application EP 0 392 225 (Example 23), which is hereby incorporated by reference. pCGN1761 contains the “double” CaMV 35S promoter and the tml transcriptional terminator with a unique EcoRI site between the promoter and the terminator and has a pUC-type backbone. A derivative of pCGN1761 is constructed which has a modified polylinker that includes NotI and XhoI sites in addition to the existing EcoRI site. This derivative is designated pCGN1761ENX. pCGN1761ENX is useful for the cloning of cDNA sequences or coding sequences (including microbial ORF sequences) within its polylinker for the purpose of their expression under the control of the 35S promoter in transgenic plants. The entire 35S promoter-coding sequence-tml terminator cassette of such a construction can be excised by HindIII, SphI, SalI, and XbaI sites 5′ to the promoter and XbaI, BamHI and BglI sites 3′ to the terminator for transfer to transformation vectors such as those disclosed below. Furthermore, the double 35S promoter fragment can be removed by 5′ excision with HindIII, SphI, SalI, XbaI, or PstI, and 3′ excision with any of the polylinker restriction sites (EcoRI, NotI or XhoI) for replacement with another promoter. If desired, modifications around the cloning sites can be made by the introduction of sequences that can enhance translation. This is particularly useful when overexpression is desired. For example, pCGN1761ENX can be modified by optimization of the translational initiation site as disclosed in Example 37 of U.S. Pat. No. 5,639,949, incorporated herein by reference.

[0331] c. Constitutive Expression: the Actin Promoter

[0332] Several isoforms of actin are known to be expressed in most cell types and consequently the actin promoter can be used as a constitutive promoter. In particular, the promoter from the rice ActI gene has been cloned and characterized (McElroy et al., 1990). A 1.3 kilobase (kb) fragment of the promoter was found to contain all the regulatory elements required for expression in rice protoplasts. Furthermore, numerous expression vectors based on the ActI promoter have been constructed specifically for use in monocotyledons (McElroy et al., 1991). These incorporate the ActI-intron 1, AdhI 5′ flanking sequence (from the maize alcohol dehydrogenase gene) and AdhI-intron 1 and sequence from the CaMV 35S promoter. Vectors showing highest expression were fusions of 35S and ActI intron or the ActI 5′ flanking sequence and the ActI intron. Optimization of sequences around the initiating ATG (of the β-glucuronidase (GUS) reporter gene) also enhanced expression. The promoter expression cassettes disclosed in McElroy et al., 1991, can be easily modified for gene expression and are particularly suitable for use in monocotyledonous hosts. For example, promoter-containing fragments are removed from the McElroy constructions and used to replace the double 35S promoter in pCGN1761ENX, which is then available for the insertion of specific gene sequences. The fusion genes thus constructed can then be transferred to appropriate transformation vectors. In a separate report, the rice ActI promoter with its first intron has also been found to direct high expression in cultured barley cells (Chibbar et al., 1993).

[0333] d. Inducible Expression: PR-1 Promoters

[0334] The double 35S promoter in pCGN1761ENX can be replaced with any other promoter of choice that will result in suitably high expression levels. By way of example, one of the chemically regulatable promoters disclosed in U.S. Pat. No. 5,614,395, such as the tobacco PR-1a promoter, can replace the double 35S promoter. Alternately, the Arabidopsis PR-1 promoter disclosed in Lebel et al., 1998, can be used. The promoter of choice can be excised from its source by restriction enzymes, but can alternatively be PCR-amplified using primers that carry appropriate terminal restriction sites. Should PCR-amplification be undertaken, the promoter can be re-sequenced to check for amplification errors after the cloning of the amplified promoter in the target vector. The chemically/pathogen regulatable tobacco PR-1a promoter is cleaved from plasmid pCIB1004 (for construction, see example 21 of EP 0 332 104, which is hereby incorporated by reference) and transferred to plasmid pCGN1761ENX (Uknes et al., 1992). pCIB1004 is cleaved with NcoI and the resulting 3′ overhang of the linearized fragment is rendered blunt by treatment with T4 DNA polymerase. The fragment is then cleaved with HindIII and the resultant PR-1a promoter-containing fragment is gel purified and cloned into pCGN1761ENX from which the double 35S promoter has been removed. This is accomplished by cleavage with XhoI and blunting with T4 polymerase, followed by cleavage with HindIII, and isolation of the larger vector-terminator containing fragment into which the pCIB1004 promoter fragment is cloned. This generates a pCGN1761 ENX derivative with the PR-1a promoter and the tml terminator and an intervening polylinker with unique EcoRI and NotI sites. The selected coding sequence can be inserted into this vector, and the fusion products (i.e. promoter-gene-terminator) can subsequently be transferred to any selected transformation vector, including those disclosed herein. Various chemical regulators can be employed to induce expression of the selected coding sequence in the plants transformed according to the presently disclosed subject matter, including the benzothiadiazole, isonicotinic acid, and salicylic acid compounds disclosed in U.S. Pat. Nos. 5,523,311 and 5,614,395.

[0335] e. Inducible Expression: an Ethanol-Inducible Promoter

[0336] A promoter inducible by certain alcohols or ketones, such as ethanol, can also be used to confer inducible expression of a coding sequence of the presently disclosed subject matter. Such a promoter is for example the alcA gene promoter from Aspergillus nidulans (Caddick et al., 1998). In A. nidulans, the alcA gene encodes alcohol dehydrogenase 1, the expression of which is regulated by the AlcR transcription factors in presence of the chemical inducer. For the purposes of the presently disclosed subject matter, the CAT coding sequences in plasmid palcA:CAT comprising a alcA gene promoter sequence fused to a minimal 35S promoter (Caddick et al., 1998) are replaced by a coding sequence of the presently disclosed subject matter to form an expression cassette having the coding sequence under the control of the alcA gene promoter. This is carried out using methods known in the art.

[0337] f. Inducible Expression: a Glucocorticoid-Inducible Promoter

[0338] Induction of expression of a nucleic acid sequence of the presently disclosed subject matter using systems based on steroid hormones is also provided. For example, a glucocorticoid-mediated induction system is used (Aoyama & Chua, 1997) and gene expression is induced by application of a glucocorticoid, for example a synthetic glucocorticoid, for example dexamethasone, at a concentration ranging in one embodiment from 0.1 mM to 1 mM, and in another embodiment from 10 mM to 100 mM. For the purposes of the presently disclosed subject matter, the luciferase gene sequences Aoyama & Chua are replaced by a nucleic acid sequence of the presently disclosed subject matter to form an expression cassette having a nucleic acid sequence of the presently disclosed subject matter under the control of six copies of the GAL4 upstream activating sequences fused to the 35S minimal promoter. This is carried out using methods known in the art. The trans-acting factor comprises the GAL4 DNA-binding domain (Keegan et al., 1986) fused to the transactivating domain of the herpes viral polypeptide VP16 (Triezenberg et al., 1988) fused to the hormone-binding domain of the rat glucocorticoid receptor (Picard et al., 1988). The expression of the fusion polypeptide is controlled either by a promoter known in the art or disclosed herein. A plant comprising an expression cassette comprising a nucleic acid sequence of the presently disclosed subject matter fused to the 6×GAL4/minimal promoter is also provided. Thus, tissue- or organ-specificity of the fusion polypeptide is achieved leading to inducible tissue- or organ-specificity of the nucleic acid sequence to be expressed.

[0339] g. Root Specific Expression

[0340] Another pattern of gene expression is root expression. A suitable root promoter is the promoter of the maize metallothionein-like (MTL) gene disclosed in de Framond, 1991, and also in U.S. Pat. No. 5,466,785, each of which is incorporated herein by reference. This “MTL” promoter is transferred to a suitable vector such as pCGN1761ENX for the insertion of a selected gene and subsequent transfer of the entire promoter-gene-terminator cassette to a transformation vector of interest.

[0341] h. Wound-Inducible Promoters

[0342] Wound-inducible promoters can also be suitable for gene expression. Numerous such promoters have been disclosed (e.g., Xu et al., 1993; Logemann et al., 1989; Rohrmeier & Lehle, 1993; Firek et al., 1993; Warner et al., 1993) and all are suitable for use with the presently disclosed subject matter. Logemann et al. describe the 5′ upstream sequences of the dicotyledonous potato wunl gene. Xu et al. show that a wound-inducible promoter from the dicotyledon potato (pin2) is active in the monocotyledon rice. Further, Rohrmeier & Lehle describe the cloning of the maize WipI cDNA that is wound induced and which can be used to isolate the cognate promoter using standard techniques. Similarly, Firek et al. and Warner et al. have disclosed a wound-induced gene from the monocotyledon Asparagus officinalis, which is expressed at local wound and pathogen invasion sites. Using cloning techniques well known in the art, these promoters can be transferred to suitable vectors, fused to the genes pertaining to the presently disclosed subject matter, and used to express these genes at the sites of plant wounding.

[0343] i. Pith-Preferred Expression

[0344] PCT International Publication WO 93/07278, which is herein incorporated by reference, describes the isolation of the maize trpA gene, which is preferentially expressed in pith cells. The gene sequence and promoter extending up to −1726 basepairs (bp) from the start of transcription are presented. Using standard molecular biological techniques, this promoter, or parts thereof, can be transferred to a vector such as pCGN1761 where it can replace the 35S promoter and be used to drive the expression of a foreign gene in a pith-preferred manner. In fact, fragments containing the pith-preferred promoter or parts thereof can be transferred to any vector and modified for utility in transgenic plants.

[0345] j. Leaf-Specific Expression

[0346] A maize gene encoding phosphoenol carboxylase (PEPC) has been disclosed by Hudspeth & Grula, 1989. Using standard molecular biological techniques, the promoter for this gene can be used to drive the expression of any gene in a leaf-specific manner in transgenic plants.

[0347] k. Pollen-Specific Expression

[0348] WO 93/07278 describes the isolation of the maize calcium-dependent protein kinase (CDPK) gene that is expressed in pollen cells. The gene sequence and promoter extend up to 1400 bp from the start of transcription. Using standard molecular biological techniques, this promoter or parts thereof can be transferred to a vector such as pCGN1761 where it can replace the 35S promoter and be used to drive the expression of a nucleic acid sequence of the presently disclosed subject matter in a pollen-specific manner.

[0349] 2. Transcriptional Terminators

[0350] A variety of 5′ and 3′ transcriptional regulatory sequences are available for use in the presently disclosed subject matter. Transcriptional terminators are responsible for the termination of transcription and correct mRNA polyadenylation. The 3′ nontranslated regulatory DNA sequence includes from in one embodiment about 50 to about 1,000, and in another embodiment about 100 to about 1,000, nucleotide base pairs and contains plant transcriptional and translational termination sequences. Appropriate transcriptional terminators and those that are known to function in plants include the CaMV 35S terminator, the tml terminator, the nopaline synthase terminator, the pea rbcS E9 terminator, the terminator for the T7 transcript from the octopine synthase gene of Agrobacterium tumefaciens, and the 3′ end of the protease inhibitor I or II genes from potato or tomato, although other 3′ elements known to those of skill in the art can also be employed. Alternatively, a gamma coixin, oleosin 3, or other terminator from the genus Coix can be used.

[0351] Non-limiting 3′ elements include those from the nopaline synthase gene of Agrobacterium tumefaciens (Bevan et al., 1983), the terminator for the T7 transcript from the octopine synthase gene of Agrobacterium tumefaciens, and the 3′ end of the protease inhibitor I or II genes from potato or tomato.

[0352] As the DNA sequence between the transcription initiation site and the start of the coding sequence (i.e., the untranslated leader sequence, also referred to as the 5′ untranslated region) can influence gene expression, a particular leader sequence can also be employed. Non-limiting leader sequences are contemplated to include those that include sequences predicted to direct optimum expression of the operatively linked gene; i.e., to include a consensus leader sequence that can increase or maintain mRNA stability and prevent inappropriate initiation of translation. The choice of such sequences will be known to those of skill in the art in light of the present disclosure. Sequences that are derived from genes that are highly expressed in plants are useful in the presently disclosed subject matter.

[0353] Thus, a variety of transcriptional terminators are available for use in expression cassettes. These are responsible for termination of transcription and correct mRNA polyadenylation. Appropriate transcriptional terminators are those that are known to function in plants and include the CaMV 35S terminator, the tml terminator, the nopaline synthase terminator, and the pea rbcS E9 terminator. These can be used in both monocotyledons and dicotyledons. In addition, a gene's native transcription terminator can be used.

[0354] 3. Other Sequences for the Enhancement or Regulation of Expression

[0355] Numerous sequences have been found to enhance gene expression from within the transcriptional unit and these sequences can be used in conjunction with the genes of the presently disclosed subject matter to increase their expression in transgenic plants.

[0356] Other sequences that have been found to enhance gene expression in transgenic plants include intron sequences (e.g., from AdhI, bronze1, actin1, actin 2 (PCT International Publication No. WO 00/760067), or the sucrose synthase intron), and viral leader sequences (e.g., from Tobacco Mosaic Virus (TMV), Maize Chlorotic Mottle Virus (MCMV), or Alfalfa Mosaic Virus (AMV)). For example, a number of non-translated leader sequences derived from viruses are known to enhance the expression of operatively linked nucleic acids. Specifically, leader sequences from Tobacco Mosaic Virus (TMV), Maize Chlorotic Mottle Virus (MCMV), and Alfalfa Mosaic Virus (AMV) have been shown to be effective in enhancing expression (e.g., Gallie et al., 1987; Skuzeski et al., 1990). Other leaders known in the art include, but are not limited to picornavirus leaders, for example, encephalomyocarditis virus (EMCV) leader (encephalomyocarditis 5′ noncoding region; Elroy-Stein et al., 1989); potyvirus leaders (e.g., Tobacco Etch Virus (TEV) leader and Maize Dwarf Mosaic Virus (MDMV) leader); human immunoglobulin heavy-chain binding protein (BiP) leader (Macejak et al., 1991); untranslated leader from the coat protein mRNA of AMV (AMV RNA 4; Jobling & Gehrke, 1987); TMV leader (Gallie et al., 1989); and maize chlorotic mottle virus leader (Lommel et al., 1991). See also, Della-Cioppa et al., 1987. Regulatory elements such as Adh intron 1 (Callis et al., 1987), sucrose synthase intron (Vasil et al., 1989) or TMV omega element (Gallie et al., 1989), can further be included where desired. Non-limiting examples of enhancers include elements from the CaMV 35S promoter, octopine synthase genes (Ellis et al., 1987), the rice actin I gene, the maize alcohol dehydrogenase gene (Callis et al., 1987), the maize shrunken I gene (Vasil et al., 1989), TMV omega element (Gallie et al., 1989) and promoters from non-plant eukaryotes (e.g., yeast; Ma et al., 1988).

[0357] A number of non-translated leader sequences derived from viruses are also known to enhance expression, and these are particularly effective in dicotyledonous cells. Specifically, leader sequences from Tobacco Mosaic Virus (TMV; the “W-sequence”), Maize Chlorotic Mottle Virus (MCMV), and Alfalfa Mosaic Virus (AMV) have been shown to be effective in enhancing expression (see e.g., Gallie et al., 1987; Skuzeski et al., 1990). Other leader sequences known in the art include, but are not limited to, picornavirus leaders, for example, EMCV (encephalomyocarditis virus) leader (5′ noncoding region; see Elroy-Stein et al., 1989); potyvirus leaders, for example, from Tobacco Etch Virus (TEV; see Allison et al., 1986); Maize Dwarf Mosaic Virus (MDMV; see Kong & Steinbiss 1998); human immunoglobulin heavy-chain binding polypeptide (BiP) leader (Macejak & Sarnow, 1991); untranslated leader from the coat polypeptide mRNA of alfalfa mosaic virus (AMV; RNA 4; see Jobling & Gehrke, 1987); tobacco mosaic virus (TMV) leader (Gallie et al., 1989); and Maize Chlorotic Mottle Virus (MCMV) leader (Lommel et al., 1991). See also, Della-Cioppa et al., 1987.

[0358] In addition to incorporating one or more of the aforementioned elements into the 5′ regulatory region of a target expression cassette of the presently disclosed subject matter, other elements can also be incorporated. Such elements include, but are not limited to, a minimal promoter. By minimal promoter it is intended that the basal promoter elements are inactive or nearly so in the absence of upstream or downstream activation. Such a promoter has low background activity in plants when there is no transactivator present or when enhancer or response element binding sites are absent. One minimal promoter that is particularly useful for target genes in plants is the Bz1 minimal promoter, which is obtained from the bronze1 gene of maize. The Bz1 core promoter is obtained from the “myc” mutant Bz1-luciferase construct pBz1LucR98 via cleavage at the NheI site located at positions −53 to −58 (Roth et al., 1991). The derived Bz1 core promoter fragment thus extends from positions −53 to +227 and includes the Bz1 intron-1 in the 5′ untranslated region. Also useful for the presently disclosed subject matter is a minimal promoter created by use of a synthetic TATA element. The TATA element allows recognition of the promoter by RNA polymerase factors and confers a basal level of gene expression in the absence of activation (see generally, Mukumoto et al., 1993; Green, 2000.

[0359] 4. Targeting of the Gene Product within the Cell

[0360] Various mechanisms for targeting gene products are known to exist in plants and the sequences controlling the functioning of these mechanisms have been characterized in some detail. For example, the targeting of gene products to the chloroplast is controlled by a signal sequence found at the amino terminal end of various polypeptides that is cleaved during chloroplast import to yield the mature polypeptides (see e.g., Comai et al., 1988). These signal sequences can be fused to heterologous gene products to affect the import of heterologous products into the chloroplast (Van den Broeck et al., 1985). DNA encoding for appropriate signal sequences can be isolated from the 5′ end of the cDNAs encoding the ribulose-1,5-bisphosphate carboxylase/oxygenase (RUBISCO) polypeptide, the chlorophyll a/b binding (CAB) polypeptide, the 5-enol-pyruvyl shikimate-3-phosphate (EPSP) synthase enzyme, the GS2 polypeptide and many other polypeptides which are known to be chloroplast localized. See also, the section entitled “Expression With Chloroplast Targeting” in Example 37 of U.S. Pat. No. 5,639,949, herein incorporated by reference.

[0361] Other gene products can be localized to other organelles such as the mitochondrion and the peroxisome (e.g., Unger et al., 1989). The cDNAs encoding these products can also be manipulated to effect the targeting of heterologous gene products to these organelles. Examples of such sequences are the nuclear-encoded ATPases and specific aspartate amino transferase isoforms for mitochondria. Targeting cellular polypeptide bodies has been disclosed by Rogers et al., 1985.

[0362] In addition, sequences have been characterized that control the targeting of gene products to other cell compartments. Amino terminal sequences are responsible for targeting to the endoplasmic reticulum (ER), the apoplast, and extracellular secretion from aleurone cells (Koehler & Ho, 1990). Additionally, amino terminal sequences in conjunction with carboxy terminal sequences are responsible for vacuolar targeting of gene products (Shinshi et al., 1990).

[0363] By the fusion of the appropriate targeting sequences disclosed above to transgene sequences of interest it is possible to direct the transgene product to any organelle or cell compartment. For chloroplast targeting, for example, the chloroplast signal sequence from the RUBISCO gene, the CAB gene, the EPSP synthase gene, or the GS2 gene is fused in frame to the amino terminal ATG of the transgene. The signal sequence selected can include the known cleavage site, and the fusion constructed can take into account any amino acids after the cleavage site that are required for cleavage. In some cases this requirement can be fulfilled by the addition of a small number of amino acids between the cleavage site and the transgene ATG or, alternatively, replacement of some amino acids within the transgene sequence. Fusions constructed for chloroplast import can be tested for efficacy of chloroplast uptake by in vitro translation of in vitro transcribed constructions followed by in vitro chloroplast uptake using techniques disclosed by Bartlett et al., 1982 and Wasmann et al., 1986. These construction techniques are well known in the art and are equally applicable to mitochondria and peroxisomes.

[0364] The above-disclosed mechanisms for cellular targeting can be utilized not only in conjunction with their cognate promoters, but also in conjunction with heterologous promoters so as to effect a specific cell-targeting goal under the transcriptional regulation of a promoter that has an expression pattern different from that of the promoter from which the targeting signal derives.

D. Construction of Plant Transformation Vectors

[0365] 1. Introduction

[0366] Numerous transformation vectors available for plant transformation are known to those of ordinary skill in the plant transformation art, and the genes pertinent to the presently disclosed subject matter can be used in conjunction with any such vectors. The selection of vector will depend upon the selected transformation technique and the target species for transformation. For certain target species, different antibiotic or herbicide selection markers might be employed. Selection markers used routinely in transformation include the nptII gene, which confers resistance to kanamycin and related antibiotics (Messing & Vieira, 1982; Bevan et al., 1983); the bar gene, which confers resistance to the herbicide phosphinothricin (White et al., 1990; Spencer et al., 1990); the hph gene, which confers resistance to the antibiotic hygromycin (Blochinger & Diggelmann, 1984); the dhfr gene, which confers resistance to methotrexate (Bourouis & Jarry, 1983); the EPSP synthase gene, which confers resistance to glyphosate (U.S. Pat. Nos. 4,940,935 and 5,188,642); and the mannose-6-phosphate isomerase gene, which provides the ability to metabolize mannose (U.S. Pat. Nos. 5,767,378 and 5,994,629).

[0367] The compositions of the presently disclosed subject matter include plant nucleic acid molecules, and the amino acid sequences of the polypeptides or partial-length polypeptides encoded by nucleic acid molecules comprising an open reading frame. These sequences can be employed to alter the expression of a particular gene corresponding to the open reading frame by decreasing or eliminating expression of that plant gene or by overexpressing a particular gene product. Methods of this embodiment of the presently disclosed subject matter include stably transforming a plant with a nucleic acid molecule of the presently disclosed subject matter that includes an open reading frame operatively linked to a promoter capable of driving expression of that open reading frame (sense or antisense) in a plant cell. By “portion” or “fragment”, as it relates to a nucleic acid molecule that comprises an open reading frame or a fragment thereof encoding a partial-length polypeptide having the activity of the full length polypeptide, is meant a sequence having in one embodiment at least 80 nucleotides, in another embodiment at least 150 nucleotides, and in still another embodiment at least 400 nucleotides. If not employed for expression, a “portion” or “fragment” means in representative embodiments at least 9, or 12, or 15, or at least 20, consecutive nucleotides (e.g., probes and primers or other oligonucleotides) corresponding to the nucleotide sequence of the nucleic acid molecules of the presently disclosed subject matter. Thus, to express a particular gene product, the method comprises introducing into a plant, plant cell, or plant tissue an expression cassette comprising a promoter operatively linked to an open reading frame so as to yield a transformed differentiated plant, transformed cell, or transformed tissue. Transformed cells or tissue can be regenerated to provide a transformed differentiated plant. The transformed differentiated plant or cells thereof can express the open reading frame in an amount that alters the amount of the gene product in the plant or cells thereof, which product is encoded by the open reading frame. The presently disclosed subject matter also provides a transformed plant prepared by the methodsa disclosed herein, as well as progeny and seed thereof.

[0368] The presently disclosed subject matter further includes a nucleotide sequence that is complementary to one (hereinafter “test” sequence) that hybridizes under stringent conditions to a nucleic acid molecule of the presently disclosed subject matter, as well as an RNA molecule that is transcribed from the nucleic acid molecule. When hybridization is performed under stringent conditions, either the test or nucleic acid molecule of presently disclosed subject matter can be present on a support: e.g., on a membrane or on a DNA chip. Thus, either a denatured test or nucleic acid molecule of the presently disclosed subject matter is first bound to a support and hybridization is effected for a specified period of time at a temperature of, in one embodiment, between 55° C. and 70° C., in 2×SSC containing 0.1% SDS, followed by rinsing the support at the same temperature but with a buffer having a reduced SSC concentration. Depending upon the degree of stringency required, such reduced concentration buffers are typically 1×SSC containing 0.1% SDS, 0.5×SSC containing 0.1% SDS, or 0.1×SSC containing 0.1% SDS.

[0369] In a further embodiment, the presently disclosed subject matter provides a transformed plant host cell, or one obtained through breeding, capable of over-expressing, under-expressing, or having a knockout of a polypeptide-encoding gene and/or its gene product(s). The plant cell is transformed with at least one such expression vector wherein the plant host cell can be used to regenerate plant tissue or an entire plant, or seed there from, in which the effects of expression, including overexpression and underexpression, of the introduced sequence or sequences can be measured in vitro or in planta.

[0370] In another aspect, the presently disclosed subject matter features an isolated cell proliferation-related polypeptide, wherein the polypeptide binds to a fragment of a protein selected from the group consisting of OsE2F1, Os018989-4003, OsE2F2, OsS49462, OsCYCOS2, OsMADS45, OsRAP1B, OsMADS6, OsFDRMADS8, OsMADS3, OsMADS5, OsMADS15, OsHOS59, OsGF14-c, OsDAD1, Os006819-2510, OsCRTC, OsSGT1, OsPN31085, OsCHIB1, OsCS, OsPP2A-2, and OsCAA90866. In some embodiments, the presently disclosed subject matter features an isolated polypeptide comprising or consisting of an amino acid sequence substantially similar to the amino acid sequence of an isolated cell proliferation-related polypeptide of the presently disclosed subject matter.

[0371] Because the proteins of the presently disclosed subject matter have a roll in cell proliferation, in certain embodiments, a cell introduced with a nucleic acid molecule of the presently disclosed subject matter has a different cell proliferation rate as compared to a cell not introduced with the nucleic acid molecule.

[0372] In another aspect, the presently disclosed subject matter features a method for modulating the proliferation of a plant cell comprising introducing an isolated nucleic acid molecule encoding a cell proliferation-related polypeptide into the plant cell, wherein the polypeptide binds to a fragment of a protein selected from the group consisting of OsE2F1, Os018989-4003, OsE2F2, OsS49462, OsCYCOS2, OsMADS45, OsRAP1B, OsMADS6, OsFDRMADS8, OsMADS3, OsMADS5, OsMADS15, OsHOS59, OsGF14-c, OsDAD1, Os006819-2510, OsCRTC, OsSGT1, OsERP, OsCHIB1, OsCS, OsPP2A-2, and OsCAA90866, wherein the polypeptide is expressed by the cell.

[0373] In another aspect, the presently disclosed subject matter features a method for modulating the proliferation of a plant cell comprising introducing an isolated nucleic acid molecule encoding a cell proliferation-related polypeptide into the plant cell, wherein the polypeptide binds to a fragment of a protein selected from the group consisting of OsE2F1, Os018989-4003, OsE2F2, OsS49462, OsCYCOS2, OsMADS45, OsRAP1B, OsMADS6, OsFDRMADS8, OsMADS3, OsMADS5, OsMADS15, OsHOS59, OsGF14-c, OsDAD1, Os006819-2510, OsCRTC, OsSGT1, OsERP, OsCHIB1, OsCS, OsPP2A-2, and OsCAA90866, wherein expression of the polypeptide encoded by the nucleic acid molecule is reduced in the cell.

[0374] As discussed herein, all of the cell proliferation-related proteins described herein affect cell proliferation, either under normal conditions, under adverse conditions (e.g., when the plant is exposed to biotic or abiotic stress), or when the plant is developing and differentiating. Accordingly, by changing the amount of a cell proliferation-related protein of the presently disclosed subject matter in a plant cell, the proliferation of that plant cell can be modulated.

[0375] In some situations, increasing expression of a cell proliferation-related protein of the presently disclosed subject matter in a cell will cause that cell to increase its rate of proliferation, either alone or in response to some stimulus (e.g., stress or growth hormone). In other situations, increasing expression of a cell proliferation-related protein of the presently disclosed subject matter in a cell causes that cell to reduce its rate of proliferation. Similarly, decreasing the expression of a cell proliferation-related protein of the presently disclosed subject matter in a cell can increase or decrease that cell's rate of proliferation. What is relevant is that the rate of proliferation of the cell changes if the level of expression of a cell proliferation-related protein of the presently disclosed subject matter is either increased or decreased.

[0376] Increasing the level of expression of a cell proliferation-related protein of the presently disclosed subject matter in a cell is a relatively simple matter. For example, overexpression of the protein can be accomplished by transforming the cell with a nucleic acid molecule encoding the protein according to standard methods such as those described above.

[0377] Once a nucleic acid sequence of the presently disclosed subject matter has been cloned into an expression system, it is transformed into a plant cell. The receptor and target expression cassettes of the presently disclosed subject matter can be introduced into the plant cell in a number of art-recognized ways. Methods for regeneration of plants are also well known in the art. For example, Ti plasmid vectors have been utilized for the delivery of foreign DNA, as well as direct DNA uptake, liposomes, electroporation, microinjection, and microprojectiles. In addition, bacteria from the genus Agrobacterium can be utilized to transform plant cells. Below are descriptions of representative techniques for transforming both dicotyledonous and monocotyledonous plants, as well as a representative plastid transformation technique.

[0378] Transformation of a plant can be undertaken with a single DNA molecule or multiple DNA molecules (i.e., co-transformation), and both these techniques are suitable for use with the expression cassettes of the presently disclosed subject matter. Numerous transformation vectors are available for plant transformation, and the expression cassettes of the presently disclosed subject matter can be used in conjunction with any such vectors. The selection of vector will depend upon the transformation technique and the species targeted for transformation.

[0379] A variety of techniques are available and known for introduction of nucleic acid molecules and expression cassettes comprising such nucleic acid molecules into a plant cell host. These techniques include, but are not limited to transformation with DNA employing A. tumefaciens or A. rhizogenes as the transforming agent, liposomes, PEG precipitation, electroporation, DNA injection, direct DNA uptake, microprojectile bombardment, particle acceleration, and the like (see e.g., EP 0 295 959 and EP 0 138 341; see also below). However, cells other than plant cells can be transformed with the expression cassettes of the presently disclosed subject matter. A general descriptions of plant expression vectors and reporter genes, and Agrobacterium and Agrobacterium-mediated gene transfer, can be found in Gruber et al., 1993, incorporated herein by reference in its entirety.

[0380] Expression vectors containing genomic or synthetic fragments can be introduced into protoplasts or into intact tissues or isolated cells. In some embodiments, expression vectors are introduced into intact tissue. “Plant tissue” includes differentiated and undifferentiated tissues or entire plants, including but not limited to roots, stems, shoots, leaves, pollen, seeds, tumor tissue, and various forms of cells and cultures such as single cells, protoplasts, embryos, and callus tissues. The plant tissue can be in plants or in organ, tissue, or cell culture. General methods of culturing plant tissues are provided, for example, by Maki et al., 1993 and by Phillips et al. 1988. In some embodiments, expression vectors are introduced into maize or other plant tissues using a direct gene transfer method such as microprojectile-mediated delivery, DNA injection, electroporation, or the like. In some embodiments, expression vectors are introduced into plant tissues using microprojectile media delivery with a biolistic device (see e.g., Tomes et al., 1995). The vectors of the presently disclosed subject matter can not only be used for expression of structural genes but can also be used in exon-trap cloning or in promoter trap procedures to detect differential gene expression in varieties of tissues (Lindsey et al., 1993; Auch & Reth, 1990).

[0381] In some embodiments, the binary type vectors of the Ti and Ri plasmids of Agrobacterium spp are employed. Ti-derived vectors can be used to transform a wide variety of higher plants, including monocotyledonous and dicotyledonous plants including, but not limited to soybean, cotton, rape, tobacco, and rice (Pacciotti et al., 1985: Byrne et al., 1987; Sukhapinda et al., 1987; Lorz et al., 1985; Potrykus, 1985; Park et al., 1985: Hiei et al., 1994). The use of T-DNA to transform plant cells has received extensive study and is amply described (European Patent Application No. EP 0 120 516; Hoekema, 1985; Knauf et al., 1983; and An et al., 1985, each of which is incorporated by reference in its entirety). For introduction into plants, the nucleic acid molecules of the presently disclosed subject matter can be inserted into binary vectors as described in the examples.

[0382] Other transformation methods are available to those skilled in the art, such as direct uptake of foreign DNA constructs (see European Patent Application No. EP 0 295 959), electroporation (Fromm et al., 1986), or high velocity ballistic bombardment of plant cells with metal particles coated with the nucleic acid constructs (Kline et al., 1987; U.S. Pat. No. 4,945,050). Once transformed, the cells can be regenerated using techniques familiar to those of skill in the art. Of particular relevance are the recently described methods to transform foreign genes into commercially important crops, such as rapeseed (De Block et al., 1989), sunflower (Everett et al., 1987), soybean (McCabe et al., 1988; Hinchee et al., 1988; Chee et al., 1989; Christou et al., 1989; European Patent Application No. EP 0 301.749), rice (Hiei et al., 1994), and corn (Gordon Kamm et al., 1990; Fromm et al., 1990).

[0383] Of course, the choice of method might depend on the type of plant, i.e., monocotyledonous or dicotyledonous, targeted for transformation. Suitable methods of transforming plant cells include, but are not limited to microinjection (Crossway et al., 1986), electroporation (Riggs et al., 1986), Agrobacterium-mediated transformation (Hinchee et al., 1988), direct gene transfer (Paszkowski et al., 1984), and ballistic particle acceleration using devices available from Agracetus, Inc. (Madison, Wis., United States of America) and BioRad (Hercules, Calif., United States of America). See e.g., U.S. Pat. No. 4,945,050; McCabe et al., 1988; Weissinger et al., 1988; Sanford et al., 1987 (onion); Christou et al., 1988 (soybean); McCabe et al., 1988 (soybean); Datta et al., 1990 (rice); Klein et al., 1988 (maize); Fromm et al., 1990 (maize); Gordon-Kamm et al., 1990 (maize); Svab et al., 1990 (tobacco chloroplast); Koziel et al., 1993 (maize); Shimamoto et al., 1989 (rice); Christou et al., 1991 (rice); European Patent Application EP 0 332 581 (orchardgrass and other Pooideae); Vasil et al., 1993 (wheat); Weeks et al., 1993 (wheat). In one embodiment, the protoplast transformation method for maize is employed (see European Patent Application EP 0 292 435; U.S. Pat. No. 5,350,689).

[0384] 2. Vectors Suitable for Agrobacterium Transformation

[0385] Agrobacterium tumefaciens cells containing a vector comprising an expression cassette of the presently disclosed subject matter, wherein the vector comprises a Ti plasmid, are useful in methods of making transformed plants. Plant cells are infected with an Agrobacterium tumefaciens as described above to produce a transformed plant cell, and then a plant is regenerated from the transformed plant cell. Numerous Agrobacterium vector systems useful in carrying out the presently disclosed subject matter are known to ordinary skill in the art.

[0386] Many vectors are available for transformation using Agrobacterium tumefaciens. These typically carry at least one T-DNA border sequence and include vectors such as pBIN19 (Bevan, 1984). Below, the construction of two typical vectors suitable for Agrobacterium transformation is disclosed.

[0387] a. pCIB200 and pCIB2001

[0388] The binary vectors pCIB200 and pCIB2001 are used for the construction of recombinant vectors for use with Agrobacterium and are constructed in the following manner. pTJS75kan is created by Nari digestion of pTJS75 (Schmidhauser & Helinski, 1985) allowing excision of the tetracycline-resistance gene, followed by insertion of an AccI fragment from pUC4K carrying an NPTII sequence (Messing & Vieira, 1982: Bevan et al., 1983: McBride & Summerfelt, 1990). XhoI linkers are ligated to the EcoRV fragment of PCIB7 which contains the left and right T-DNA borders, a plant selectable nos/nptII chimeric gene and the pUC polylinker (Rothstein et al., 1987), and the XhoI-digested fragment are cloned into SalI-digested pTJS75kan to create pCIB200 (see also EP 0 332 104, example 19). pCIB200 contains the following unique polylinker restriction sites: EcoRI, SstI, KpnI, BglII, XbaI, and SalI. pCIB2001 is a derivative of pCIB200 created by the insertion into the polylinker of additional restriction sites. Unique restriction sites in the polylinker of pCIB2001 are EcoRI, SstI, KpnI, BglII, XbaI, SalI, MluI, BclI, AvrII, ApaI, HpaI, and StuI. pCIB2001, in addition to containing these unique restriction sites, also has plant and bacterial kanamycin selection, left and right T-DNA borders for Agrobacterium-mediated transformation, the RK2-derived trfA function for mobilization between E. coli and other hosts, and the OriT and OriV functions also from RK2. The pCIB2001 polylinker is suitable for the cloning of plant expression cassettes containing their own regulatory signals.

[0389] b. pCIB10 and Hygromycin Selection Derivatives Thereof

[0390] The binary vector pCIB10 contains a gene encoding kanamycin resistance for selection in plants, T-DNA right and left border sequences, and incorporates sequences from the wide host-range plasmid pRK252 allowing it to replicate in both E. coli and Agrobacterium. Its construction is disclosed by Rothstein et al., 1987. Various derivatives of pCIB10 can be constructed which incorporate the gene for hygromycin B phosphotransferase disclosed by Gritz & Davies, 1983. These derivatives enable selection of transgenic plant cells on hygromycin only (pCIB743), or hygromycin and kanamycin (pCIB715, pCIB717).

[0391] 3. Vectors Suitable for Non-Agrobacterium Transformation

[0392] Transformation without the use of Agrobacterium tumefaciens circumvents the requirement for T-DNA sequences in the chosen transformation vector, and consequently vectors lacking these sequences can be utilized in addition to vectors such as the ones disclosed above that contain T-DNA sequences. Transformation techniques that do not rely on Agrobacterium include transformation via particle bombardment, protoplast uptake (e.g., polyethylene glycol (PEG) and electroporation), and microinjection. The choice of vector depends largely on the species being transformed. Below, the construction of typical vectors suitable for non-Agrobacterium transformation is disclosed.

[0393] a. pCIB3064

[0394] pCIB3064 is a pUC-derived vector suitable for direct gene transfer techniques in combination with selection by the herbicide BASTA® (glufosinate ammonium or phosphinothricin). The plasmid pCIB246 comprises the CaMV 35S promoter in operational fusion to the E. coli α-glucuronidase (GUS) gene and the CaMV 35S transcriptional terminator and is disclosed in the PCT International Publication WO 93/07278. The 35S promoter of this vector contains two ATG sequences 5′ of the start site. These sites are mutated using standard PCR techniques in such a way as to remove the ATGs and generate the restriction sites SspI and PvuII. The new restriction sites are 96 and 37 bp away from the unique SalI site and 101 and 42 bp away from the actual start site. The resultant derivative of pCIB246 is designated pCIB3025. The GUS gene is then excised from pCIB3025 by digestion with SalI and SacI, the termini rendered blunt and religated to generate plasmid pCIB3060. The plasmid pJIT82 is obtained from the John Innes Centre, Norwich, England, and the 400 bp SmaI fragment containing the bar gene from Streptomyces viridochromogenes is excised and inserted into the HpaI site of pCIB3060 (Thompson et al., 1987). This generated pCIB3064, which comprises the bar gene under the control of the CaMV 35S promoter and terminator for herbicide selection, a gene for ampicillin resistance (for selection in E. coli) and a polylinker with the unique sites SphI, PstI, HindIII, and BamHI. This vector is suitable for the cloning of plant expression cassettes containing their own regulatory signals.

[0395] b. pSOG19 and pSOG35

[0396] pSOG35 is a transformation vector that utilizes the E. Coli dihydrofolate reductase (DHFR) gene as a selectable marker conferring resistance to methotrexate. PCR is used to amplify the 35S promoter (−800 bp), intron 6 from the maize Adh1 gene (−550 bp), and 18 bp of the GUS untranslated leader sequence from pSOG10. A 250-bp fragment encoding the E. coli dihydrofolate reductase type II gene is also amplified by PCR and these two PCR fragments are assembled with a SacI-PstI fragment from pB1221 (BD Biosciences Clontech, Palo Alto, Calif., United States of America) that comprises the pUC19 vector backbone and the nopaline synthase terminator. Assembly of these fragments generates pSOG19 that contains the 35S promoter in fusion with the intron 6 sequence, the GUS leader, the DHFR gene, and the nopaline synthase terminator. Replacement of the GUS leader in pSOG19 with the leader sequence from Maize Chlorotic Mottle Virus (MCMV) generates the vector pSOG35. pSOG19 and pSOG35 carry the pUC gene for ampicillin resistance and have HindIII, SphI, PstI, and EcoRI sites available for the cloning of foreign substances.

[0397] 4. Selectable Markers for Transformation Approaches

[0398] Methods using either a form of direct gene transfer or Agrobacterium-mediated transfer usually, but not necessarily, are undertaken with a selectable marker that can provide resistance to an antibiotic (e.g., kanamycin, hygromycin, or methotrexate) or a herbicide (e.g., phosphinothricin). The choice of selectable marker for plant transformation is not, however, critical to the presently disclosed subject matter.

[0399] For certain plant species, different antibiotic or herbicide selection markers can be employed. Selection markers used routinely in transformation include the nptII gene, which confers resistance to kanamycin and related antibiotics (Messing & Vierra, 1982; Bevan et al., 1983), the bar gene, which confers resistance to the herbicide phosphinothricin (White et al., 1990, Spencer et al., 1990), the hph gene, which confers resistance to the antibiotic hygromycin (Blochinger & Diggelmann, 1984), and the dhfr gene, which confers resistance to methotrexate (Bourouis & Jarry, 1983).

[0400] Selection markers resulting in positive selection, such as a phosphomannose isomerase (PMI) gene (described in PCT International Publication No. WO 93/05163) can also be used. Other genes that can be used for positive selection are described in PCT International Publication No. WO 94/20627 and encode xyloisomerases and phosphomanno-isomerases such as mannose-6-phosphate isomerase and mannose-1-phosphate isomerase; phosphomanno mutase; mannose-epimerases such as those that convert carbohydrates to mannose or mannose to carbohydrates such as glucose or galactose; phosphatases such as mannose or xylose phosphatase, mannose-6-phosphatase and mannose-1-phosphatase, and permeases that are involved in the transport of mannose, or a derivative or a precursor thereof, into the cell. An agent is typically used to reduce the toxicity of the compound to the cells, and is typically a glucose derivative such as methyl-3-O-glucose or phloridzin. Transformed cells are identified without damaging or killing the non-transformed cells in the population and without co-introduction of antibiotic or herbicide resistance genes. As described in PCT International Publication No. WO 93/05163, in addition to the fact that the need for antibiotic or herbicide resistance genes is eliminated, it has been shown that the positive selection method is often far more efficient than traditional negative selection.

[0401] As noted above, one vector useful for direct gene transfer techniques in combination with selection by the herbicide BASTA® (or phosphinothricin) is pCIB3064. This vector is based on the plasmid pCIB246, which comprises the CaMV 35S promoter operatively linked to the E. coli β-glucuronidase (GUS) gene and the CaMV 35S transcriptional terminator, and is described in PCT International Publication No. WO 93/07278. One gene useful for conferring resistance to phosphinothricin is the bar gene from Streptomyces viridochromogenes (Thompson et al., 1987). This vector is suitable for the cloning of plant expression cassettes containing their own regulatory signals.

[0402] As noted above, an additional transformation vector is pSOG35, which utilizes the E. coli dihydrofolate reductase (DHFR) gene as a selectable marker conferring resistance to methotrexate. Polymerase chain reaction (PCR) was used to amplify the 35S promoter (about 800 basepairs (bp)), intron 6 from the maize Adh1 gene (about 550 bp), and 18 bp of the GUS untranslated leader sequence from pSOG10. A 250 bp fragment encoding the E. coli dihydrofolate reductase type II gene was also amplified by PCR and these two PCR fragments are assembled with a SacI-PstI fragment from pBI221 (BD Biosciences—Clontech, Palo Alto, Calif., United States of America), which comprised the pUC19 vector backbone and the nopaline synthase terminator. Assembly of these fragments generated pSOG19, which contains the 35S promoter in fusion with the intron 6 sequence, the GUS leader, the DHFR gene and the nopaline synthase terminator. Replacement of the GUS leader in pSOG19 with the leader sequence from Maize Chlorotic Mottle Virus (MCMV) generated the vector pSOG35. pSOG19 and pSOG35 carry the pUC-derived gene for ampicillin resistance, and have HindIII, SphI, PstI and EcoRI sites available for the cloning of foreign sequences.

[0403] Binary backbone vector pNOV2117 contains the T-DNA portion flanked by the right and left border sequences, and including the POSITECH™ (Syngenta Corp., Wilmington, Del., United States of America) plant selectable marker and the “candidate gene” gene expression cassette. The POSITECH™ plant selectable marker confers resistance to mannose and in this instance consists of the maize ubiquitin promoter driving expression of the PMI (phosphomannose isomerase) gene, followed by the cauliflower mosaic virus transcriptional terminator.

[0404] 5. Vector Suitable for Chloroplast Transformation

[0405] For expression of a nucleotide sequence of the presently disclosed subject matter in plant plastids, plastid transformation vector pPH143 (PCT International Publication WO 97/32011, example 36) is used. The nucleotide sequence is inserted into pPH143 thereby replacing the protoporphyrinogen oxidase (Protox) coding sequence. This vector is then used for plastid transformation and selection of transformants for spectinomycin resistance. Alternatively, the nucleotide sequence is inserted in pPH143 so that it replaces the aadH gene. In this case, transformants are selected for resistance to PROTOX inhibitors.

[0406] 6. Transformation of Plastids

[0407] In another embodiment, a nucleotide sequence of the presently disclosed subject matter is directly transformed into the plastid genome. Plastid transformation technology is described in U.S. Pat. Nos. 5,451,513; 5,545,817; and 5,545,818; and in PCT International Publication No. WO 95/16783; and in McBride et al., 1994. The basic technique for chloroplast transformation involves introducing regions of cloned plastid DNA flanking a selectable marker together with the gene of interest into a suitable target tissue, e.g., using biolistics or protoplast transformation (e.g., calcium chloride or PEG mediated transformation). The 1 to 1.5 kilobase (kb) flanking regions, termed targeting sequences, facilitate orthologous recombination with the plastid genome and thus allow the replacement or modification of specific regions of the plastome. Initially, point mutations in the chloroplast 16S rRNA and rps12 genes conferring resistance to spectinomycin and/or streptomycin are utilized as selectable markers for transformation (Svab et al., 1990; Staub et al., 1992). This resulted in stable homoplasmic transformants at a frequency of approximately one per 100 bombardments of target leaves. The presence of cloning sites between these markers allowed creation of a plastid targeting vector for introduction of foreign genes (Staub et al., 1993). Substantial increases in transformation frequency are obtained by replacement of the recessive rRNA or r-protein antibiotic resistance genes with a dominant selectable marker, the bacterial aadA gene encoding the spectinomycin-detoxifying enzyme aminoglycoside-3N-adenyltransferase (Staub et al., 1993). Other selectable markers useful for plastid transformation are known in the art and encompassed within the scope of the presently disclosed subject matter. Typically, approximately 15-20 cell division cycles following transformation are required to reach a homoplastidic state.

[0408] Plastid expression, in which genes are inserted by orthologous recombination into all of the several thousand copies of the circular plastid genome present in each plant cell, takes advantage of the enormous copy number advantage over nuclear-expressed genes to permit expression levels that can readily exceed 10% of the total soluble plant protein. In one embodiment, a nucleotide sequence of the presently disclosed subject matter is inserted into a plastid targeting vector and transformed into the plastid genome of a desired plant host. Plants homoplastic for plastid genomes containing a nucleotide sequence of the presently disclosed subject matter are obtained, and are in one embodiment capable of high expression of the nucleotide sequence.

[0409] An example of plastid transformation follows. Seeds of Nicotiana tabacum c.v. ‘Xanthi nc’ are germinated seven per plate in a 1″ circular array on T agar medium and bombarded 12-14 days after sowing with 1 μm tungsten particles (M10, Biorad, Hercules, Calif., United States of America) coated with DNA from plasmids pPH143 and pPH145 essentially as disclosed (Svab & Maliga, 1993). Bombarded seedlings are incubated on T medium for two days after which leaves are excised and placed abaxial side up in bright light (350-500 μmol photons/m²/s) on plates of RMOP medium (Svab et al., 1990) containing 500 μg/ml spectinomycin dihydrochloride (Sigma, St. Louis, Mo., United States of America). Resistant shoots appearing underneath the bleached leaves three to eight weeks after bombardment are subcloned onto the same selective medium, allowed to form callus, and secondary shoots isolated and subcloned. Complete segregation of transformed plastid genome copies (homoplasmicity) in independent subclones is assessed by standard techniques of Southern blotting (Sambrook & Russell, 2001). BamHI/EcoRI-digested total cellular DNA (Mettler, 1987) is separated on 1% Tris-borate-EDTA (TBE) agarose gels, transferred to nylon membranes (Amersham Biosciences, Piscataway, N.J., United States of America) and probed with ³²P-labeled random primed DNA sequences corresponding to a 0.7 kb BamHI/HindIII DNA fragment from pC8 containing a portion of the rps7/12 plastid targeting sequence. Homoplasmic shoots are rooted aseptically on spectinomycin-containing MS/IBA medium (McBride et al., 1994) and transferred to the greenhouse.

[0410] 7. Transformation of Dicotyledons

[0411] Transformation techniques for dicotyledons are well known in the art and include Agrobacterium-based techniques and techniques that do not require Agrobacterium. Non-Agrobacterium techniques involve the uptake of exogenous genetic material directly by protoplasts or cells. This can be accomplished by PEG or electroporation-mediated uptake, particle bombardment-mediated delivery, or microinjection. Examples of these techniques are disclosed in Paszkowski et al., 1984; Potrykus et al., 1985; Reich et al., 1986; and Klein et al., 1987. In each case the transformed cells are regenerated to whole plants using standard techniques known in the art.

[0412] Agrobacterium-mediated transformation is a useful technique for transformation of dicotyledons because of its high efficiency of transformation and its broad utility with many different species. Agrobacterium transformation typically involves the transfer of the binary vector carrying the foreign DNA of interest (e.g., pCIB200 or pCIB2001) to an appropriate Agrobacterium strain which can depend on the complement of vir genes carried by the host Agrobacterium strain either on a co-resident Ti plasmid or chromosomally (e.g., strain CIB542 for pCIB200 and pCIB2001 (Uknes et al., 1993). The transfer of the recombinant binary vector to Agrobacterium is accomplished by a triparental mating procedure using E. coli carrying the recombinant binary vector, a helper E. coli strain that carries a plasmid such as pRK2013 and which is able to mobilize the recombinant binary vector to the target Agrobacterium strain. Alternatively, the recombinant binary vector can be transferred to Agrobacterium by DNA transformation (Höfgen & Willmitzer, 1988).

[0413] Transformation of the target plant species by recombinant Agrobacterium usually involves co-cultivation of the Agrobacterium with explants from the plant and follows protocols well known in the art. Transformed tissue is regenerated on selectable medium carrying the antibiotic or herbicide resistance marker present between the binary plasmid T-DNA borders.

[0414] Another approach to transforming plant cells with a gene involves propelling inert or biologically active particles at plant tissues and cells. This technique is disclosed in U.S. Pat. Nos. 4,945,050; 5,036,006; and 5,100,792; all to Sanford et al. Generally, this procedure involves propelling inert or biologically active particles at the cells under conditions effective to penetrate the outer surface of the cell and afford incorporation within the interior thereof. When inert particles are utilized, the vector can be introduced into the cell by coating the particles with the vector containing the desired gene. Alternatively, the target cell can be surrounded by the vector so that the vector is carried into the cell by the wake of the particle. Biologically active particles (e.g., dried yeast cells, dried bacterium, or a bacteriophage, each containing DNA sought to be introduced) can also be propelled into plant cell tissue.

[0415] 8. Transformation of Monocotyledons

[0416] Transformation of most monocotyledon species has now also become routine. Exemplary techniques include direct gene transfer into protoplasts using PEG or electroporation, and particle bombardment into callus tissue. Transformations can be undertaken with a single DNA species or multiple DNA species (i.e. co-transformation), and both these techniques are suitable for use with the presently disclosed subject matter. Co-transformation can have the advantage of avoiding complete vector construction and of generating transgenic plants with unlinked loci for the gene of interest and the selectable marker, enabling the removal of the selectable marker in subsequent generations, should this be regarded as desirable. However, a disadvantage of the use of co-transformation is the less than 100% frequency with which separate DNA species are integrated into the genome (Schocher et al., 1986).

[0417] Patent Applications EP 0 292 435, EP 0 392 225, and WO 93/07278 describe techniques for the preparation of callus and protoplasts from an elite inbred line of maize, transformation of protoplasts using PEG or electroporation, and the regeneration of maize plants from transformed protoplasts. Gordon-Kamm et al., 1990 and Fromm et al., 1990 have published techniques for transformation of A188-derived maize line using particle bombardment. Furthermore, WO 93/07278 and Koziel et al., 1993 describe techniques for the transformation of elite inbred lines of maize by particle bombardment. This technique utilizes immature maize embryos of 1.5-2.5 mm length excised from a maize ear 14-15 days after pollination and a PDS-1000He Biolistic particle delivery device (DuPont Biotechnology, Wilmington, Del., United States of America) for bombardment.

[0418] Transformation of rice can also be undertaken by direct gene transfer techniques utilizing protoplasts or particle bombardment. Protoplast-mediated transformation has been disclosed for Japonica-types and Indica-types (Zhang et al., 1988; Shimamoto et al., 1989; Datta et al., 1990) of rice. Both types are also routinely transformable using particle bombardment (Christou et al., 1991). Furthermore, WO 93/21335 describes techniques for the transformation of rice via electroporation. Casas et al., 1993 discloses the production of transgenic sorghum plants by microprojectile bombardment.

[0419] Patent Application EP 0 332 581 describes techniques for the generation, transformation, and regeneration of Pooideae protoplasts. These techniques allow the transformation of Dactylis and wheat. Furthermore, wheat transformation has been disclosed in Vasil et al., 1992 using particle bombardment into cells of type C long-term regenerable callus, and also by Vasil et al., 1993 and Weeks et al., 1993 using particle bombardment of immature embryos and immature embryo-derived callus.

[0420] A representative technique for wheat transformation, however, involves the transformation of wheat by particle bombardment of immature embryos and includes either a high sucrose or a high maltose step prior to gene delivery. Prior to bombardment, embryos (0.75-1 mm in length) are plated onto MS medium with 3% sucrose (Murashige & Skoog, 1962) and 3 mg/l 2,4-dichlorophenoxyacetic acid (2,4-D) for induction of somatic embryos, which is allowed to proceed in the dark. On the chosen day of bombardment, embryos are removed from the induction medium and placed onto the osmoticum (i.e. induction medium with sucrose or maltose added at the desired concentration, typically 15%). The embryos are allowed to plasmolyze for 2-3 hours and are then bombarded. Twenty embryos per target plate are typical, although not critical. An appropriate gene-carrying plasmid (such as pCIB3064 or pSG35) is precipitated onto micrometer size gold particles using standard procedures. Each plate of embryos is shot with the DuPont BIOLISTICS® helium device using a burst pressure of about 1000 pounds per square inch (psi) using a standard 80 mesh screen. After bombardment, the embryos are placed back into the dark to recover for about 24 hours (still on osmoticum). After 24 hours, the embryos are removed from the osmoticum and placed back onto induction medium where they stay for about a month before regeneration. Approximately one month later the embryo explants with developing embryogenic callus are transferred to regeneration medium (MS+1 mg/liter NAA, 5 mg/liter GA), further containing the appropriate selection agent (10 mg/l BASTA® in the case of pCIB3064 and 2 mg/l methotrexate in the case of pSOG35). After approximately one month, developed shoots are transferred to larger sterile containers known as “GA7s” which contain half-strength MS, 2% sucrose, and the same concentration of selection agent.

[0421] Transformation of monocotyledons using Agrobacterium has also been disclosed. See WO 94/00977 and U.S. Pat. No. 5,591,616, both of which are incorporated herein by reference. See also Negrofto et al., 2000, incorporated herein by reference. Zhao et al., 2000 specifically discloses transformation of sorghum with Agrobacterium. See also U.S. Pat. No. 6,369,298.

[0422] Rice (Oryza sativa) can be used for generating transgenic plants. Various rice cultivars can be used (Hiei et al., 1994; Dong et al., 1996; Hiei et al., 1997). Also, the various media constituents disclosed below can be either varied in quantity or substituted. Embryogenic responses are initiated and/or cultures are established from mature embryos by culturing on MS-CIM medium (MS basal salts, 4.3 g/liter; B5 vitamins (200×), 5 ml/liter, Sucrose, 30 g/liter; proline, 500 mg/liter; glutamine, 500 mg/liter; casein hydrolysate, 300 mg/liter; 2,4-D (1 mg/ml), 2 ml/liter; pH adjusted to 5.8 with 1 N KOH; Phytagel, 3 gaiter). Either mature embryos at the initial stages of culture response or established culture lines are inoculated and co-cultivated with the Agrobacterium tumefaciens strain LBA4404 (Agrobacterium) containing the desired vector construction. Agrobacterium is cultured from glycerol stocks on solid YPC medium (plus 100 mg/L spectinomycin and any other appropriate antibiotic) for about 2 days at 28° C. Agrobacterium is re-suspended in liquid MS-CIM medium. The Agrobacterium culture is diluted to an OD₆₀₀ of 0.2-0.3 and acetosyringone is added to a final concentration of 200 μM. Acetosyringone is added before mixing the solution with the rice cultures to induce Agrobacterium for DNA transfer to the plant cells. For inoculation, the plant cultures are immersed in the bacterial suspension. The liquid bacterial suspension is removed and the inoculated cultures are placed on co-cultivation medium and incubated at 22° C. for two days. The cultures are then transferred to MS-CIM medium with ticarcillin (400 mg/liter) to inhibit the growth of Agrobacterium. For constructs utilizing the PMI selectable marker gene (Reed et al., 2001), cultures are transferred to selection medium containing mannose as a carbohydrate source (MS with 2% mannose, 300 mg/liter ticarcillin) after 7 days, and cultured for 3-4 weeks in the dark. Resistant colonies are then transferred to regeneration induction medium (MS with no 2,4-D, 0.5 mg/liter IAA, 1 mg/liter zeatin, 200 mg/liter TIMENTIN®, 2% mannose, and 3% sorbitol) and grown in the dark for 14 days. Proliferating colonies are then transferred to another round of regeneration induction media and moved to the light growth room. Regenerated shoots are transferred to GA7 containers with GA7-1 medium (MS with no hormones and 2% sorbitol) for 2 weeks and then moved to the greenhouse when they are large enough and have adequate roots. Plants are transplanted to soil in the greenhouse (T₀ generation) grown to maturity and the T₁ seed is harvested. E. Growth and Screeninq of Transformed Cells

[0423] Transgenic plant cells are then placed in an appropriate selective medium for selection of transgenic cells, which are then grown to callus. Shoots are grown from callus and plantlets generated from the shoot by growing in rooting medium. The various constructs normally are joined to a marker for selection in plant cells. Conveniently, the marker can be resistance to a biocide (for example, an antibiotic including, but not limited to kanamycin, G418, bleomycin, hygromycin, chloramphenicol, herbicide, or the like). The particular marker used is designed to allow for the selection of transformed cells (as compared to cells lacking the DNA that has been introduced). Components of DNA constructs including transcription cassettes of the presently disclosed subject matter are prepared from sequences that are native (endogenous) or foreign (exogenous) to the host. As used herein, the terms “foreign” and “exogenous” refer to sequences that are not found in the wild-type host into which the construct is introduced, or alternatively, have been isolated from the host species and incorporated into an expression vector. Heterologous constructs contain in one embodiment at least one region that is not native to the gene from which the transcription initiation region is derived.

[0424] To confirm the presence of the transgenes in transformed cells and plants, a variety of assays can be performed. Such assays include, for example, “molecular biological” assays well known to those of skill in the art, such as Southern and Northern blotting, in situ hybridization and nucleic acid-based amplification methods such as PCR or RT-PCR; “biochemical” assays, such as detecting the presence of a protein product, e.g., by immunological means (enzyme-linked immunosorbent assays (ELISAs) and Western blots) or by enzymatic function; plant part assays, such as seed assays; and also by analyzing the phenotype of the whole regenerated plant, e.g., for disease or pest resistance.

[0425] DNA can be isolated from cell lines or any plant parts to determine the presence of the preselected nucleic acid segment through the use of techniques well known to those skilled in the art. Note that intact sequences will not always be present, presumably due to rearrangement or deletion of sequences in the cell.

[0426] The presence of nucleic acid elements introduced through the methods of this presently disclosed subject matter can be determined by the polymerase chain reaction (PCR). Using this technique, discreet fragments of nucleic acid are amplified and detected by gel electrophoresis. This type of analysis permits one to determine whether a preselected nucleic acid segment is present in a stable transformant. It is contemplated that using PCR techniques it would be possible to clone fragments of the host genomic DNA adjacent to an introduced preselected DNA segment.

[0427] Positive proof of DNA integration into the host genome and the independent identities of transformants can be determined using the technique of Southern hybridization. Using this technique, specific DNA sequences that are introduced into the host genome and flanking host DNA sequences can be identified. Hence, the Southern hybridization pattern of a given transformant serves as an identifying characteristic of that transformant. In addition, it is possible through Southern hybridization to demonstrate the presence of introduced preselected DNA segments in high molecular weight DNA: e.g., to confirm that the introduced preselected DNA segment has been integrated into the host cell genome. Southern hybridization provides certain information that can also be obtained using PCR, e.g., the presence of a preselected DNA segment, but can also demonstrate integration of an exogenous nucleic acid molecule into the genome and can characterize each individual transformant.

[0428] It is contemplated that using the techniques of dot or slot blot hybridization, which are modifications of Southern hybridization techniques, the same information that is derived from PCR could be obtained (e.g., the presence of a preselected DNA segment).

[0429] Both PCR and Southern hybridization techniques can be used to demonstrate transmission of a preselected DNA segment to progeny. In most instances, the characteristic Southern hybridization pattern for a given transformant will segregate in progeny as one or more Mendelian genes (Spencer et al., 1990; Laursen et al., 1994), indicating stable inheritance of the gene. The non-chimeric nature of the callus and the parental transformants (R₀) can be suggested by germline transmission and the identical Southern blot hybridization patterns and intensities of the transforming DNA in callus, R₀ plants, and R₁ progeny that segregated for the transformed gene.

[0430] Whereas certain DNA analysis techniques can be conducted using DNA isolated from any part of a plant, specific RNAs might only be expressed in particular cells or tissue types and hence it can be necessary to prepare RNA for analysis from these tissues. PCR techniques can also be used for detection and quantitation of RNA produced from introduced preselected DNA molecules. In this application of PCR, it is first necessary to reverse transcribe RNA into complementary DNA (cDNA) using an enzyme such as a reverse transcriptase, and then through the use of conventional PCR techniques, to amplify the resulting cDNA.

[0431] In some instances, PCR techniques might not demonstrate the integrity of the RNA product. Further information about the nature of the RNA product can be obtained by Northern blotting. This technique demonstrates the presence of an RNA species and additionally gives information about the integrity of that RNA. The presence or absence of an RNA species can also be determined using dot or slot blot Northern hybridizations using techniques known in the art. These techniques are modifications of Northern blotting and typically demonstrate only the presence or absence of an RNA species.

[0432] Thus, Southern blotting and PCR can be used to detect the presence of a DNA molecule of interest. Expression can be evaluated by specifically identifying the protein products of the introduced preselected DNA segments or evaluating the phenotypic changes brought about by their expression.

[0433] Assays for the production and identification of specific proteins can make use of physical-chemical, structural, functional, or other properties of the proteins. Unique physical-chemical or structural properties allow the proteins to be separated and identified by electrophoretic procedures, such as native or denaturing gel electrophoresis or isoelectric focusing, or by chromatographic techniques such as ion exchange or gel exclusion chromatography. The unique structures of individual proteins offer opportunities for use of specific antibodies to detect the presence of individual proteins using art-recognized techniques such as an ELISA assay. Combinations of approaches can be employed to gain additional information, such as Western blotting, in which antibodies are used to locate individual gene products that have been separated by electrophoretic techniques and transferred to a solid support. Additional techniques can be employed to confirm the identity of the product of interest, such as evaluation by amino acid sequencing following purification. Although these are among the most commonly employed, other procedures known to the skilled artisan can also be used.

[0434] Assay procedures can also be used to identify the expression of proteins by their functions, especially the ability of enzymes to catalyze specific chemical reactions involving specific substrates and products. These reactions can be followed by providing and quantifying the loss of substrates or the generation of products of the reactions by physical or chemical procedures. Examples are as varied as the enzyme to be analyzed, and are known in the art for many different enzymes.

[0435] The expression of a gene product can also be determined by evaluating the phenotypic results of its expression. These assays also can take many forms including, but not limited to analyzing changes in the chemical composition, morphology, or physiological properties of the plant. Morphological changes can include greater stature or thicker stalks. Changes in the response of plants or plant parts to imposed treatments are typically evaluated under carefully controlled conditions termed bioassays.

[0436] As such, protein expression levels can be measured by any standard method. For example, antibodies (monoclonal or polyclonal) can be generated by standard methods that specifically bind to a cell proliferation-related protein of the presently disclosed subject matter (see methods for making antibodies in, e.g., Ausubel et al., 1988, including updates up to 2002; Harlow & Lane, 1988). Using such a cell proliferation-related protein-specific antibody, protein levels can be determined by any immunological method including, without limitation, Western blotting, immunoprecipitation, and ELISA.

[0437] Another non-limiting method for measuring protein level is by measuring mRNA levels. For example, total mRNA can be isolated from a cell introduced with a nucleic acid molecule of the presently disclosed subject matter (or with an antisense of such a nucleic acid molecule) and from an untreated cell. Northern blotting analysis using the nucleic acid molecule that was introduced to the treated cell as a probe can indicate if the treated cell expresses the nucleic acid molecule at a different level (at both the mRNA and polypeptide levels) as compared to the untreated cell.

[0438] Changes in cell proliferation rates (either in unchallenged cells and plants, or in cells and plants challenged with, for example, exposure to salt or pathogen-infection) can be readily determined by counting the cells by any standard method. For example, cells can be manually counted using a hemacytometer or microscope. Callus growth and plant growth can be measured by weight and/or height. Individual cell growth can be determined by any standard cell proliferation assay (e.g., ³H incorporation).

[0439] The presently disclosed subject matter further includes the manipulation of cell and plant proliferation by modulation of the expression of more than one of the cell proliferation-related proteins described herein. For example, an increase in the level of expression of a first cell proliferation-related protein coupled with a decrease in the level of expression of a second the cell proliferation-related protein can result in a greater change in the proliferation rate of a cell (or plant including such a cell) than either the increase in the level of expression of a first cell proliferation-related protein of the decrease in the level of expression of a second the cell proliferation-related protein alone. The presently disclosed subject matter has provided numerous cell proliferation-related proteins and their interrelations with one another. Manipulation of expression of one or more of the cell proliferation-related proteins of the presently disclosed subject matter enables the development of genetically engineered plants (i.e., transgenic plants) that have superior growth rates either in favorable conditions, under differentiation, or under stress (e.g., biotic or abiotic stress).

VI. Plants, Breeding, and Seed Production

A. Plants

[0440] A host cell is any type of cell including, without limitation, a bacterial cell, a yeast cell, a plant cell, an insect cell, and a mammalian cell. Numerous such cells are commercially available, for example, from the American Type Culture Collection, Manassas, Va., United States of America.

[0441] In certain embodiments, the cell is a plant cell, which can be regenerated to form a transgenic plant. Thus, the presently disclosed subject matter provides a transformed (transgenic) plant cell, in planta or ex planta, including a transformed plastid or other organelle (e.g., nucleus, mitochondria or chloroplast). As used herein, a “transgenic plant” is a plant having one or more plant cells that contain an exogenous nucleic acid molecule (e.g., a nucleic acid molecule encoding a cell proliferation-related polypeptide of the presently disclosed subject matter). Thus, a transgenic plant can comprise a nucleic acid molecule comprising a foreign nucleic acid sequence (i.e. a nucleic acid sequence derived from a different plant species). Alternatively or in addition, a transgenic plant can comprise a nucleic acid molecule comprising a nucleic acid sequence from the same plant species, wherein the nucleic acid sequence has been isolated from that plant species. In the latter example, the nucleic acid sequence can be the same or different from the wild-type sequence, and can optionally include regulatory sequences that are the same or different from those that are found in the naturally occurring plant.

[0442] The presently disclosed subject matter can be used for transforming cells of any plant species, including, but not limited to from corn (Zea mays), Brassica sp. (e.g., B. napus, B. rapa, B. juncea), particularly those Brassica species useful as sources of seed oil, alfalfa (Medicago sativa), rice (Oryza saliva), rye (Secale cereale), sorghum (Sorghum bicolor, Sorghum vulgare), millet (e.g., pearl millet (Pennisetum glaucum)), proso millet (Panicum miliaceum), foxtail millet (Setaria italica), finger millet (Eleusine coracana)), sunflower (Helianthus annuus), safflower (Carthamus tinctorius), wheat (Triticum aestivum), soybean (Glycine max), tobacco (Nicotiana tabacum), potato (Solanum tuberosum), peanut (Arachis hypogaea), cotton (Gossypium barbadense, Gossypium hirsutum), sweet potato (Ipomoea batatus), cassaya (Manihot esculenta), coffee (Cofea spp.), coconut (Cocos nucifera), pineapple (Ananas comosus), citrus trees (Citrus spp.), cocoa (Theobroma cacao), tea (Camellia sinensis), banana (Musa spp.), avocado (Persea ultilane), fig (Ficus casica), guava (Psidium guajava), mango (Mangifera indica), olive (Olea europaea), papaya (Carica papaya), cashew (Anacardium occidentale), macadamia (Macadamia integrifolia), almond (Prunus amygdalus), sugar beets (Beta vulgaris), sugarcane (Saccharum spp.), oats, duckweed (Lemna), barley, vegetables, omamentals, and conifers.

[0443] Duckweed (Lemna, see PCT International Publication No. WO 00/07210) includes members of the family Lemnaceae. There are known four genera and 34 species of duckweed as follows: genus Lemna (L. aequinoctialis, L. disperma, L. ecuadoriensis, L. gibba, L. japonica, L. minor, L. miniscula, L. obscura, L. perpusilla, L. tenera, L. trisulca, L. turionifera, L. valdiviana); genus Spirodela (S. intermedia, S. polyrrhiza, S. punctata); genus Woffia (Wa. Angusta, Wa. Arrhiza, Wa. Australina, Wa. Borealis, Wa. Brasiliensis, Wa. Columbiana, Wa. Elongata, Wa. Globosa, Wa. Microscopica, Wa. Neglecta) and genus Wofiella (W1. ultila, W1. ultilanen, W1. gladiata, W1. ultila, W1. lingulata, W1. repunda, W1. rotunda, and W1. neotropica). Any other genera or species of Lemnaceae, if they exist, are also aspects of the presently disclosed subject matter. In one embodiment, Lemna gibba is employed in the presently disclosed subject matter, and in other embodiments, Lemna minor and Lemna miniscula are employed. Lemna species can be classified using the taxonomic scheme described by Landolt, 1986.

[0444] Vegetables within the scope of the presently disclosed subject matter include tomatoes (Lycopersicon esculentum), lettuce (e.g., Lactuca sativa), green beans (Phaseolus vulgaris), lima beans (Phaseolus limensis), peas (Lathyrus spp.), and members of the genus Cucumis such as cucumber (C. sativus), cantaloupe (C. cantalupensis), and musk melon (C. melo). Ornamentals include azalea (Rhododendron spp.), hydrangea (Macrophylla hydrangea), hibiscus (Hibiscus rosasanensis), roses (Rosa spp.), tulips (Tulipa spp.), daffodils (Narcissus spp.), petunias (Petunia hybrida), carnations (Dianthus caryophyllus), poinsettias (Euphorbia pulcherrima), and chrysanthemums. Conifers that can be employed in practicing the presently disclosed subject matter include, for example, pines such as loblolly pine (Pinus taeda), slash pine (Pinus elliotii), ponderosa pine (Pinus ponderosa), lodgepole pine (Pinus contorta), and Monterey pine (Pinus radiata), Douglas-fir (Pseudotsuga menziesil); Western hemlock (Tsuga ultilane); Sitka spruce (Picea glauca); redwood (Sequoia sempervirens); true firs such as silver fir (Abies amabilis) and balsam fir (Abies balsamea); and cedars such as Western red cedar (Thuja plicata) and Alaska yellow-cedar (Chamaecyparis nootkatensis).

[0445] Leguminous plants that can be employed in the presently disclosed subject matter include beans and peas. Representative beans include guar, locust bean, fenugreek, soybean, garden beans, cowpea, mungbean, lima bean, fava bean, lentils, chickpea, etc. Legumes include, but are not limited to Arachis (e.g., peanuts), Vicia (e.g., crown vetch, hairy vetch, adzuki bean, mung bean, and chickpea), Lupinus (e.g., lupine, trifolium), Phaseolus (e.g., common bean and lima bean), Pisum (e.g., field bean), Melilotus (e.g., clover), Medicago (e.g., alfalfa), Lotus (e.g., trefoil), lens (e.g., lentil), and false indigo. Non-limiting forage and turf grass for use in the methods of the presently disclosed subject matter include alfalfa, orchard grass, tall fescue, perennial ryegrass, creeping bent grass, and redtop.

[0446] Other plants within the scope of the presently disclosed subject matter include Acacia, aneth, artichoke, arugula, blackberry, canola, cilantro, clementines, escarole, eucalyptus, fennel, grapefruit, honey dew, jicama, kiwifruit, lemon, lime, mushroom, nut, okra, orange, parsley, persimmon, plantain, pomegranate, poplar, radiata pine, radicchio, Southern pine, sweetgum, tangerine, triticale, vine, yams, apple, pear, quince, cherry, apricot, melon, hemp, buckwheat, grape, raspberry, chenopodium, blueberry, nectarine, peach, plum, strawberry, watermelon, eggplant, pepper, cauliflower, Brassica, e.g., broccoli, cabbage, ultilan sprouts, onion, carrot, leek, beet, broad bean, celery, radish, pumpkin, endive, gourd, garlic, snapbean, spinach, squash, turnip, ultilane, and zucchini.

[0447] Ornamental plants within the scope of the presently disclosed subject matter include impatiens, Begonia, Pelargonium, Viola, Cyclamen, Verbena, Vinca, Tagetes, Primula, Saint Paulia, Agertum, Amaranthus, Antihirrhinum, Aquilegia, Cineraria, Clover, Cosmo, Cowpea, Dahlia, Datura, Delphinium, Gerbera, Gladiolus, Gloxinia, Hippeastrum, Mesembryanthemum, Salpiglossos, and Zinnia.

[0448] In certain embodiments, transgenic plants of the presently disclosed subject matter are crop plants and in particular cereals. Such crop plants and cereals include, but are not limited to corn, alfalfa, sunflower, rice, Brassica, canola, soybean, barley, soybean, sugarbeet, cotton, safflower, peanut, sorghum, wheat, millet, and tobacco.

[0449] The presently disclosed subject matter also provides plants comprising the disclosed compositions. In one embodiment, the plant is characterized by a modification of a phenotype or measurable characteristic of the plant, the modification being attributable to the expression cassette. In one embodiment, the modification involves, for example, nutritional enhancement, increased nutrient uptake efficiency, enhanced production of endogenous compounds, or production of heterologous compounds. In another embodiment, the modification includes having increased or decreased resistance to an herbicide, an abiotic stress, or a pathogen. In another embodiment, the modification includes having enhanced or diminished requirement for light, water, nitrogen, or trace elements. In another embodiment, the modification includes being enriched for an essential amino acid as a proportion of a polypeptide fraction of the plant. In another embodiment, the polypeptide fraction can be, for example, total seed polypeptide, soluble polypeptide, insoluble polypeptide, water-extractable polypeptide, and lipid-associated polypeptide. In another embodiment, the modification includes overexpression, underexpression, antisense modulation, sense suppression, inducible expression, inducible repression, or inducible modulation of a gene.

B. Breeding

[0450] The plants obtained via transformation with a nucleic acid sequence of the presently disclosed subject matter can be any of a wide variety of plant species, including monocots and dicots; however, the plants used in the method for the presently disclosed subject matter are selected in one embodiment from the list of agronomically important target crops set forth hereinabove. The expression of a gene of the presently disclosed subject matter in combination with other characteristics important for production and quality can be incorporated into plant lines through breeding. Breeding approaches and techniques are known in the art. See e.g., Welsh, 1981; Wood, 1983; Mayo, 1987; Singh, 1986; Wricke & Weber, 1986.

[0451] The genetic properties engineered into the transgenic seeds and plants disclosed above are passed on by sexual reproduction or vegetative growth and can thus be maintained and propagated in progeny plants. Generally, the maintenance and propagation make use of known agricultural methods developed to fit specific purposes such as tilling, sowing, or harvesting. Specialized processes such as hydroponics or greenhouse technologies can also be applied. As the growing crop is vulnerable to attack and damage caused by insects or infections as well as to competition by weed plants, measures are undertaken to control weeds, plant diseases, insects, nematodes, and other adverse conditions to improve yield. These include mechanical measures such as tillage of the soil or removal of weeds and infected plants, as well as the application of agrochemicals such as herbicides, fungicides, gametocides, nematicides, growth regulants, ripening agents, and insecticides.

[0452] Use of the advantageous genetic properties of the transgenic plants and seeds according to the presently disclosed subject matter can further be made in plant breeding, which aims at the development of plants with improved properties such as tolerance of pests, herbicides, or biotic or abiotic stress, improved nutritional value, increased yield or proliferation, or improved structure causing less loss from lodging or shattering. The various breeding steps are characterized by well-defined human intervention such as selecting the lines to be crossed, directing pollination of the parental lines, or selecting appropriate progeny plants.

[0453] Depending on the desired properties, different breeding measures are taken. The relevant techniques are well known in the art and include, but are not limited to, hybridization, inbreeding, backcross breeding, multiline breeding, variety blend, interspecific hybridization, aneuploid techniques, etc. Hybridization techniques can also include the sterilization of plants to yield male or female sterile plants by mechanical, chemical, or biochemical means. Cross-pollination of a male sterile plant with pollen of a different line assures that the genome of the male sterile but female fertile plant will uniformly obtain properties of both parental lines. Thus, the transgenic seeds and plants according to the presently disclosed subject matter can be used for the breeding of improved plant lines that, for example, increase the effectiveness of conventional methods such as herbicide or pesticide treatment or allow one to dispense with said methods due to their modified genetic properties. Alternatively new crops with improved stress tolerance can be obtained, which, due to their optimized genetic “equipment”, yield harvested product of better quality than products that were not able to tolerate comparable adverse developmental conditions (for example, drought).

[0454] Additionally, The presently disclosed subject matter also provides a transgenic plant, a seed from such a plant, and progeny plants from such a plant including hybrids and inbreds. In representative embodiments, transgenic plants are transgenic maize, soybean, barley, alfalfa, sunflower, canola, soybean, cotton, peanut, sorghum, tobacco, sugarbeet, rice, wheat, rye, turfgrass, millet, sugarcane, tomato, or potato.

[0455] A transformed (transgenic) plant of the presently disclosed subject matter includes a plant, the genome of which is augmented by an exogenous nucleic acid molecule, or in which a gene has been disrupted, e.g., to result in a loss, a decrease, or an alteration in the function of the product encoded by the gene, which plant can also have increased yields and/or produce a better-quality product than the corresponding wild-type plant. The nucleic acid molecules of the presently disclosed subject matter are thus useful for targeted gene disruption, as well as for use as markers and probes.

[0456] The presently disclosed subject matter also provides a method of plant breeding, e.g., to prepare a crossed fertile transgenic plant. The method comprises crossing a fertile transgenic plant comprising a particular nucleic acid molecule of the presently disclosed subject matter with itself or with a second plant, e.g., one lacking the particular nucleic acid molecule, to prepare the seed of a crossed fertile transgenic plant comprising the particular nucleic acid molecule. The seed is then planted to obtain a crossed fertile transgenic plant. The plant can be a monocot or a dicot. In a particular embodiment, the plant is a cereal plant.

[0457] The crossed fertile transgenic plant can have the particular nucleic acid molecule inherited through a female parent or through a male parent. The second plant can be an inbred plant. The crossed fertile transgenic can be a hybrid. Also included within the presently disclosed subject matter are seeds of any of these crossed fertile transgenic plants.

C. Seed Production

[0458] Some embodiments of the presently disclosed subject matter also provide seed and isolated product from plants that comprise an expression cassette comprising a promoter sequence operatively linked to an isolated nucleic acid as disclosed herein. In some embodiments, the isolated nucleic acid molecule is selected from the group consisting of:
[0459] a. a nucleic acid molecule encoding a polypeptide comprising an amino acid sequence of one of even numbered SEQ ID NOs: 2-192;
[0460] b. a nucleic acid molecule comprising a nucleic acid sequence of one of odd numbered SEQ ID NOs:1-191;
[0461] c. a nucleic acid molecule that has a nucleic acid sequence at least 90% identical to the nucleic acid sequence of the nucleic acid molecule of (a) or (b);
[0462] d. a nucleic acid molecule that hybridizes to (a) or (b) under conditions of hybridization selected from the group consisting of:
   [0463] i. 7% sodium dodecyl sulfate (SDS), 0.5 M NaPO₄, 1 mM ethylenediamine tetraacetic acid (EDTA) at 50° C. with a final wash in 2× standard saline citrate (SSC), 0.1% SDS at 50° C.;
   [0464] ii. 7% SDS, 0.5 M NaPO₄, 1 mM EDTA at 50° C. with a final wash in 1×SSC, 0.1% SDS at 50° C.;
   [0465] iii. 7% SDS, 0.5 M NaPO₄, 1 mM EDTA at 50° C. with a final wash in 0.5×SSC, 0.1% SDS at 50° C.;
   [0466] iv. 7% sodium dodecyl sulfate (SDS), 0.5 M NaPO₄, 1 mM EDTA at 50° C. with a final wash in 0.1×SSC, 0.1% SDS at 50° C.; and
   [0467] v. 7% sodium dodecyl sulfate (SDS), 0.5 M NaPO₄, 1 mM EDTA at 50° C. with a final wash in 0.1×SSC, 0.1% SDS at 65° C.;
[0468] e. a nucleic acid molecule comprising a nucleic acid sequence fully complementary to (a); and
[0469] f. a nucleic acid molecule comprising a nucleic acid sequence that is the full reverse complement of (a).

[0470] In one embodiment the isolated product comprises an enzyme, a nutritional polypeptide, a structural polypeptide, an amino-acid, a lipid, a fatty acid, a polysaccharide, a sugar, an alcohol, an alkaloid, a carotenoid, a propanoid, a steroid, a pigment, a vitamin, or a plant hormone.

[0471] Embodiments of the presently disclosed subject matter also relate to isolated products produced by expression of an isolated nucleic acid containing a nucleotide sequence selected from the group consisting of:
[0472] (a) a nucleotide sequence that hybridizes under conditions of hybridization of 45° C. in 1 M NaCl, followed by a final washing step at 50° C. in 0.1 M NaCl to a nucleotide sequence listed in odd numbered sequences of SEQ ID NOs:1-191, or a fragment, domain, or feature thereof;
[0473] (b) a nucleotide sequence encoding a polypeptide that is an ortholog of a polypeptide listed in even numbered sequences of SEQ ID NOs: 2-192, or a fragment, domain, or feature thereof;
[0474] (c) a nucleotide sequence complementary (for example, fully complementary) to (a) or (b); and
[0475] (d) a nucleotide sequence that is the reverse complement (for example, its full reverse complement) of (a) or (b) according to the present disclosure.

[0476] In one embodiment, the product is produced in a plant. In another embodiment, the product is produced in cell culture. In another embodiment, the product is produced in a cell-free system. In one embodiment, the product comprises an enzyme, a nutritional polypeptide, a structural polypeptide, an amino acid, a lipid, a fatty acid, a polysaccharide, a sugar, an alcohol, an alkaloid, a carotenoid, a propanoid, a steroid, a pigment, a vitamin, or a plant hormone. In another embodiment, the product is polypeptide comprising an amino acid sequence listed in even numbered sequences of SEQ ID NOs: 2-192, or ortholog thereof. In one embodiment, the polypeptide comprises an enzyme.

[0477] In seed production, germination quality and uniformity of seeds are essential product characteristics. As it is difficult to keep a crop free from other crop and weed seeds, to control seedborne diseases, and to produce seed with good germination, fairly extensive and well-defined seed production practices have been developed by seed producers who are experienced in the art of growing, conditioning, and marketing of pure seed. Thus, it is common practice for the farmer to buy certified seed meeting specific quality standards instead of using seed harvested from his own crop. Propagation material to be used as seeds is customarily treated with a protectant coating comprising herbicides, insecticides, fungicides, bactericides, nematicides, molluscicides, or mixtures thereof. Customarily used protectant coatings comprise compounds such as captan, carboxin, thiram (tetramethylthiuram disulfide; TMTD®; available from R. T. Vanderbilt Company, Inc., Norwalk, Conn., United States of America), methalaxyl (APRON XL®; available from Syngenta Corp., Wilmington, Del., United States of America), and pirimiphos-methyl (ACTELLIC®; available from Agriliance, LLC, St. Paul, Minn., United States of America). If desired, these compounds are formulated together with further carriers, surfactants, and/or application-promoting adjuvants customarily employed in the art of formulation to provide protection against damage caused by bacterial, fungal, or animal pests. The protectant coatings can be applied by impregnating propagation material with a liquid formulation or by coating with a combined wet or dry formulation. Other methods of application are also possible such as treatment directed at the buds or the fruit.

[0478] The presently disclosed subject matter will be further described by reference to the following detailed examples. These examples are provided for purposes of illustration only, and are not intended to be limiting unless otherwise specified.

### EXAMPLES

[0479] The following Examples have been included to illustrate modes of the presently disclosed subject matter. In light of the present disclosure and the general level of skill in the art, those of skill will appreciate that the following Examples are intended to be exemplary only and that numerous changes, modifications, and alterations can be employed without departing from the scope of the presently disclosed subject matter.

### Example I

[0480] Plant growth is accomplished two ways: by cell growth and by cell division, each of which is respectively controlled by the G1 phases and the M phases of the cell cycle. Cyclins are proteins that play an active role in controlling nuclear cell division cycles, and regulate cyclin dependent kinases (CDKs), which are essential for cell cycle progression in eukaryotes. John et al., 2001 teaches that all cyclins interact with the catalytic subunit of cyclin-dependent protein kinases (CDK), and the two proteins (i.e., the cyclin and CDK), along with the CDK activating subunit, in turn phosphorylate substrates on serine or threonine residues, thereby controlling a chain of events that advance the cell through the various phases of the cell cycle.

[0481] Eukaryotic cells have multiple classes of cyclins, each of which is required for specific regulatory steps during the cell cycle. Activity and substrate specificity of the cyclin-CDK enzyme complex is determined by the specific cyclin subunit associated with the CDK catalytic subunit. Thus, the association of CDKs with specific cyclins is a key regulatory mechanism that advances the cell through the various stages of the cell cycle. Cell cycle progression involves changes in abundance of individual cyclins, due to changing rates of their transcription or proteolysis, with consequent changes in the substrates of CDK through the cell cycle. Cyclin accumulation is particularly important in terminating the G1 phase, when such accumulation raises CDK activity and starts events leading to DNA replication.

[0482] Cyclins are essential for CDK activation and their binding to specific individual proteins is thought to provide potential substrates to CDKs (John et al., 2001). Thus, the yeast two-hybrid approach was thought to be a useful method to dissect cyclin-mediated cell cycle events. Cyclin and CDK complex substrates include CDK inhibitors, kinases and phosphatases, enzymes that control DNA replication, the cytoskeletal structures necessary for chromosome movement during mitosis, and compounds of the ubiquitin-dependent pathway for degradation of proteins, all of which participate in key steps of the cell cycle. High levels of CDK activity alternate with high levels of proteolytic activity, which is responsible for the turnover of cyclins and CDK inhibitors.

[0483] The eukaryotic cell cycle has a growth phase and a reproductive phase, the latter involving replication of chromosomes and their subsequent distribution to daughter cells. Cyclins are well conserved, and thus have been comparatively well characterized in plants. However, while the basic mechanisms of cell cycle control and the key genes that mediate cell cycle progression are highly conserved in eukaryotes (reviewed in Potuschak & Doerner, 2001; John et al., 2001), some pathways regulating cell proliferation in plants are different from those in animals partly because plants are sessile and require developmental flexibility to respond to a spectrum of environmental changes (e.g., flexible growth rates and patterns to exploit their environment optimally, cell division and expansion being essential to responding to environmental changes). Therefore, the pathways regulating cell proliferation in plants are likely different from those in animals. In higher plants, the cell cycle is coupled with developmental phase changes that are regulated by a complex gene network. (CDK-cyclin complexes and their involvement in cell cycle progression are reviewed by John et al., 2001). Plant cyclins and their associations with CDKs and substrate proteins are important and serve as key regulatory mechanisms that control proliferation in response to the many environmental and developmental cues that affect plant growth and development. The role of cyclin-CDK complexes in regulation of the plant cell cycle is reviewed in John et al., 2001 and Potuschak & Doerner, 2001.

[0484] This Example provides newly characterized rice proteins interacting with O. sativa E2F Homolog (OsE2F1) and identified by means of a yeast two-hybrid assay technology. One of the interactors found is a rice DP homolog similar to Triticum sp. DP Protein. This interactor was named Hypothetical Protein 018989-4003 (Os018989-4003) and was also used as a bait in the yeast two-hybrid screen.

[0485] In animals, members of the E2F transcription factor family regulate the expression of genes required for progression through the cell cycle, such as genes coding for several regulatory proteins and for enzymes involved in nucleotide and DNA synthesis. Specifically, E2F/DP complexes are important regulators of the G1/S transition (reviewed by Trimarchi & Lees, 2002), at which checkpoint cells either initiate the S phase or undergo arrest of the cell cycle. E2F transcriptional activity results from the concerted action of a family of E2F-like proteins that form heterodimers. Based on sequence homology and functional properties of the genes that encode them, at least six E2F (E2F1-E2F6) and two DP (DP1 and DP2) proteins have been identified in mammals as components of E2F complexes existing in all possible combinations. E2F subgroups (E2F1, E2F2 and E2F3, versus E2F4 and E2F5) are functionally distinct from each other, and are thought to act in opposition to one another to mediate the activation or the repression of cell cycle regulator genes, thereby promoting either cellular proliferation or cell cycle arrest and terminal differentiation. Additionally, E2F activity is regulated by interactions with other cellular proteins including the three members of the retinoblastoma (RB) protein family pRB, p107 and p130, which bind to E2F and negatively regulate its transcriptional activity, and by indirect binding of cyclins and cyclin-dependent kinases (CDKs). Phosphorylation of RB proteins by G1-specific CDKs releases the E2F heterodimer from the RB protein in late G1 to S phase, and the resulting “free E2F” induces the expression of many genes implicated in cellular proliferation, including cell cycle regulators and enzymes required for DNA synthesis. Individual E2F-DP complexes elicit different transcriptional responses depending on the identity of the E2F subunits and the proteins that are associated with the complex. These observations lend support to the yeast two-hybrid approach as a method to dissect E2F-mediated cell cycle control.

[0486] A number of cDNAs encoding E2F or DP homologs have been isolated from plants and characterized, including three E2F and two DP proteins from Arabidopsis thaliana (Magyar et al., 2000; reviewed in Kosugi & Ohashi, 2002). Plant E2Fs share high sequence similarity but no distinguishable similarity with the animal E2F proteins, though they slightly resemble E2F4 and E2F-5. However, evidence is accumulating that plant E2F-like genes are functionally equivalent to their mammalian homologs and that the G1/S transition in plants is at least partly under the control of regulators similar to those found in animals, such as D-type cyclins, Rb-related proteins, and E2F and DP homologs. Like animal E2Fs, plant E2F proteins can bind to the consensus binding sites of the animal E2F and their DNA-binding activities can be stimulated by human and plant DP proteins. They can also bind human RB or plant RB-like proteins. However, their properties, including transactivation, subcellular localization, and functional differences, have not been well characterized (Kosugi & Ohashi, 2002). One study indicates that, unlike animal E2Fs, the Arabidopsis E2F and DP are not predominantly localized to the nucleus, but rather their nuclear localization is controlled by an interaction with some DPs andor other proteins (Kosugi & Ohashi, 2002). Based on these findings, Kosugi & Ohashi, 2002 suggests that the function of plant E2F and DP proteins is primarily controlled by their nuclear localization mediated by the interaction with specific partner proteins, and that this difference in the regulation of the E2F/RB pathway between plants and animals can reflect differences in cell cycle regulation.

[0487] The protein interactions involving the rice E2F and DP homologs identified in this Example are aimed at elucidating the mechanisms of E2F-mediated cell cycle regulation in plants. Proteins that participate in cell cycle regulation in rice are targets for genetic manipulation or for compounds that modify their level or activity, thereby modulating the plant cell cycle. The identification of genes encoding these proteins, as described herein, allows genetic manipulation of crops or application of compounds to modulate the plant cell cycle and effect agronomically desirable changes in plant development or growth.

Results

[0488] OsE2F1 was found to interact with four novel rice proteins: two DP-like proteins (Os018989-4003 and OsPN26539); a kinesin-like protein (OsPN29946) with a putative microtubule motor function in events occurring in the G1/S transition phase of the cell cycle; and a protein of unknown function (OsPN30852).

[0489] The novel DP protein Os018989-4003 (as either bait or prey in the yeast two-hybrid screen) interacted with rice E2F homolog OsE2F1 (described above) and with two splicing variants of rice E2F2 homolog, OsE2F2 (annotated in the public domain) and OsE2F2 (367) (identified in this study). The OsE2F2 (367) variant also interacted with another novel DP-like protein, OsPN31182. Other interactors identified for the DP protein Os018989-4003 include rice kinesin-like protein (OsAAG13527); MADS box protein MADS14 (OsMADS14), with a known role in flower development; putative myosin heavy chain (OsAAK72891), which likely functions as an actin motor in cell-cycle-dependent cytoskeletal dynamic events; and another myosin heavy-chain-like protein, the novel protein OsPN22824.

[0490] The interacting proteins of this Example are listed in Tables 1 and 2 below, followed by detailed information on each protein and a discussion of the significance of the interactions. A diagram of the some of the interactions described in this Example is provided in FIG. 1. The nucleotide sequences (from which the amino acid sequences can be deduced) of the proteins of this Example are provided in odd numbered SEQ ID NOs: 1-11, and 193-199.

[0491] Some of the proteins identified represent novel nice proteins previously uncharacterized. Based on their predicted biological function and on the ability of the prey proteins to specifically interact with rice E2F homolog OsE2F1 and DP homolog Os018989-4003, the interacting proteins are likely involved in the E2F-mediated regulation of the cell cycle.

TABLE 1
Interacting Proteins Identified for OsE2F1 (E2F Homolog)
The names of the clones of the proteins used as baits and found as preys
protein name are given. Nucleotide/protein sequence accession numbers
for the proteins of this Example (or related proteins) are shown in
parentheses under the protein name. The bait and prey coordinates (Coord)
are the amino acids encoded by the bait fragment(s) used in the search and
by the interacting prey clone(s), respectively. The source is the library
from which each prey clone was retrieved.

| | | | |
|---|---|---|---|
| | Protein Name | | Prey Coord |
| Gene Name | (GENBANK ® Accession No.) | Bait Coord | (source) |

BAIT PROTEIN

| | | |
|---|---|---|
| OsE2F1 | O. sativa E2F Homolog | 300-437 & |
| PN19758 | (AB041725; BAB20932) | |
| (SEQ ID NO: 194) | | |

INTERACTORS

| | | | |
|---|---|---|---|
| Os018989- | Hypothetical Protein 018989- | 100-250 | 9-179 |
| 4003* | 4003, Similar to Triticum sp. DP | | 177-294 |
| PN21044 | Protein | | (Output Trait) |
| (SEQ ID NO: 2) | | | |
| OsPN26539 | Novel Protein PN26539 | 100-250 | 2 × 66-346 |
| (SEQ ID NO: 4) | (AC087544), Probable DP | | 2 × 194-346 |
| | | | 82-253 |
| | | | (Output Trait) |
| OsPN29946 | Novel Protein PN29946, Similar | 100-250 | 2 × 173-470 |
| (SEQ ID NO: 6) | to A. thaliana Kinesin-Like Protein | | (Output Trait) |
| | (BAB11329.1; e = 0.0) | | |
| OsPN30852 | Novel Protein PN30852 | 100-250 | 45-86 |
| (SEQ ID NO: 8) | | | (Output Trait) |

& Self-activating clone, i.e., it activates the reporter genes in the two-hybrid system in the absence of a prey protein, and thus it was not used in the search
*This protein was also used as a bait in this Example (see Table 2).

[0492] TABLE 2
Interacting Proteins Identified for Os018989-4003
(Hypothetical Protein 018989-4003, Similar to Triticum sp. DP Protein)

| | | | |
|---|---|---|---|
| | Protein Name | | Prey Coord |
| Gene Name | (GENBANK ® Accession No.) | Bait Coord | (Source) |

BAIT PROTEIN

| | |
|---|---|
| Os018989- | Hypothetical Protein 018989- |
| 4003 | 4003, Similar to Triticum sp. DP |
| PN21044 | Protein |
| (SEQ ID NO: 2) | |

INTERACTORS

| | | | |
|---|---|---|---|
| OsE2F1 | O. sativa E2F Homolog | 90-220 | 191-436 |
| PN19758 | (AB041725; BAB20932) | | (Output Trait) |
| (SEQ ID NO: 194) | | | 95-276 |
| | | | (Input Trait) |
| OsE2F2# | O. sativa E2F2 Homolog | 90-220 | 90-358 |
| PN21003 | (AB041726; BAB20933) | | (Input Trait) |
| (SEQ ID NO: 10) | | | |
| OsAAG13527 | O. sativa Kinesin-like Protein | 90-220 | 668-859 |
| PN23367 | (AC068924; AAG13527.1) | | (Output Trait) |
| (SEQ ID NO: 196) | | | |
| OsAAK72891 | O. sativa Putative Myosin Heavy | 90-220 | 342-638 |
| PN26317 | Chain | | 322-549 |
| (SEQ ID NO: 198) | (AC091123; AAK72891) | | (Input Trait) |
| | | | 339-651 |
| | | | (Output Trait) |
| OsMADS14* | O. sativa MADS Box Protein | 90-220 | 54-180 |
| PN20910 | MADS14 | | (Output Trait) |
| (SEQ ID NO: 200) | (AF058697, AAF19047) | | |
| OsPN22824& | Novel Protein PN22824, Myosin | 90-220 | 2 × 393-494 |
| (SEQ ID NO: 12) | heavy chain | | (Output Trait) |

#A splicing variant of the OsE2F2 sequence, OsE2F2 (367), was used as a bait; its interactions are shown below in Table 3
*Additional interactions identified for OsMADS14 are listed below on Table 4
&Additional interactions identified for PN22824 are listed below on Table 5

[0493] TABLE 3
Interacting Proteins Identified for OsE2F2
(E2F2 Homolog, Alternative Transcript, 367)

| | | | |
|---|---|---|---|
| | Protein Name | | |
| | (GENBANK ® | | Prey Coord |
| Gene Name | Accession No.) | Bait Coord | (source) |

BAIT PROTEIN

| | | |
|---|---|---|
| OsE2F2 (367) | E2F2 Homolog, Alt. | 180-368 |
| PN21003 | Transcript (367) | |
| (SEQ ID NO: 10) | (AB041726; BAB20933) | |

INTERACTORS

| | | | |
|---|---|---|---|
| Os018989- | Hypothetical Protein | 1-368 | 69-294 |
| 4003 | 018989-4003, Similar to | | (Input Trait) |
| PN21044 | Triticum sp. DP Protein | | |
| (SEQ ID NO: 2) | | | |
| OsPN31182 | Novel Protein PN31182, | | 124-324 |
| (SEQ ID NO: 14) | A. thaliana DP-Like | | 72-255 |
| | Protein | | 156-334 |
| | (CAC15483.1; 9e⁻⁵⁵) | | (Input Trait) |

[0494] TABLE 4
Additional interactions identified for OsMADS14

| | | | |
|---|---|---|---|
| | Protein Name | | |
| | (GENBANK ® | | Prey Coord |
| Gene Name | Accession No.) | Bait Coord | (source) |

PREY PROTEIN

| | | | |
|---|---|---|---|
| OsMADS14 | O. sativa MADS Box | 50-198 | 124-223 |
| PN20910 | Protein MADS14 | | 82-197 |
| (SEQ ID | (AF058697, AAF19047) | | (output trait) |
| NO: 200) | | | |

BAIT PROTEIN

| | |
|---|---|
| OsMADS45 | O. sativa MADS Box |
| PN20231 | Protein MADS45 |
| (1905929- | (U31994, AAB50180) |
| OS000555) | |
| (SEQ ID | |
| NO: 202) | |

[0495] TABLE 5
Additional interactions identified for OsPN22824

| | | | |
|---|---|---|---|
| | Protein Name | | |
| | (GENBANK ® | | Prey Coord |
| Gene Name | Accession No.) | Bait Coord | (source) |

PREY PROTEIN

| | | | |
|---|---|---|---|
| OsPN22824 | Novel Protein PN22824 | 1-198 | 301-500 |
| (SEQ ID | | | (Input Trait) |
| NO: 12) | | | |

BAIT PROTEIN

| | |
|---|---|
| OsRACD | O. sativa Small GTP- |
| PN19695 | Binding Protein RACDP |
| (SEQ ID | (AF218381; AAF28764) |
| NO: 204) | |

Two-Hybrid System Using OsE2F1 as Bait

[0496] OsE2F1 (GENBANK® Accession No. BAB20932; Kosugi & Ohashi, 2002) is a 436-amino acid protein that is a member of the E2F transcription factor family. It contains a transcription factor E2F/dimerization partner (TDP) signature (amino acids 108 to 333), as predicted by analysis of the amino acid sequence (3.1e⁻³⁵ prediction value). E2F proteins function as heterodimers with transcription factors called DP proteins (Wu et al., 1995). These transcriptional complexes regulate the transcription of genes encoding proteins required for progression through the cell cycle. Consistent with the interactions of E2F transcription factors with DP proteins documented in the literature are those identified in this Example between the rice orthologs of these proteins. It is likely that the Os018989-4003-OsE2F1 interaction represents a step in cell cycle control in rice. This interaction was identified for both Os018989-4003 and OsE2F1 used as bait.

[0497] The bait fragment used in the yeast two-hybrid screen encoded amino acids 100 to 250 of OsE2F1.

[0498] OsE2F1 was found to interact with Os018989-4003, a protein of 294 amino acids that includes the presence of a transcription factor E2F/dimerization partner (TDP) signature (amino acids 100 to 294, 3.2e⁻¹⁷). E2F transcription factors form heterodimers with DP proteins; the resulting E2F/DP transcriptional complexes function as transcriptional activators of genes required for progression through the cell cycle (Wu et al., 1995). The activity of E2F/DP complexes is normally regulated by association with negative regulators of the retinoblastoma protein (pRB) family such as pRB, p107, and p130, and with other cellular proteins including cyclins and cyclin-dependent kinases (CDKs). Wu et al., 1995 also demonstrated that the binding specificity of the various E2F/DP complexes towards pRB or p107 is mediated by the E2F subunit. In agreement with the presence of the TDP signature, a BLAST analysis of the amino acid sequence of Os018989-4003 against the Genpept database indicated that this protein shares 62.5% identity with Triticum sp. DP protein (GENBANK® Accession No. CAC19034, 62.5%, e⁻⁹¹). These analyses thus indicate that Os018989-4003 is a rice DP homolog.

[0499] Os018989-4003 was also used as a bait in the yeast two-hybrid screen. Its interactions are shown in Table 2 and discussed later in this Example.

[0500] OsE2F1 was also found to interact with novel protein OsPN26539. A BLAST analysis of the nucleotide sequence of the prey clone OsPN26539 identified the gene potentially encoding novel protein PN26539 on rice chromosome 10 clone nbxb0046P18A (GENBANK® Accession No. 26539). A BLAST analysis of the 346-amino acid sequence of OsPN26539 indicated that this protein is similar to a putative protein (GENBANK® Accession No. NP_{—}568116.1, 61% identity, 2e⁻¹⁰³), Transcription Factor-Like Protein (GENBANK® Accession No. T48364, 56% identity, 6e⁻⁹⁶), and DP-Like Protein (GENBANK®-Accession No. CAC15483, 53% identity, e⁻⁵⁵), all from A. thaliana. The DP-like protein is AtDPa, one of the two distinct DP-related proteins (AtDPa and AtDPb) identified in Arabidopsis by Magyar et al., 2000. These authors showed that AtDPa and AtDPb heterodimerize in vitro with the Arabidopsis E2F-related proteins AtE2Fa and AtE2Fb identified by the same group. They also found that the AtDPa and AtE2Fa genes are transcribed in a cell cycle-dependent manner, being predominantly produced in actively dividing cells, with highest transcript levels in early S phase cells. The novel protein OsPN26539 is thus likely a rice DP transcription factor.

[0501] OsE2F1 was also found to interact with novel protein OsPN29946. A BLAST analysis of the 614-amino acid sequence of OsPN29946 indicated that this protein is similar to kinesin-like protein (GENBANK® Accession No. BAB11329.1, 70.9% identity, e=0.0) from A. thaliana. Kinesins are molecular motors, molecules that hydrolyze ATP and use the derived energy to generate motor force. Molecular motors are involved in diverse cellular functions such as vesicle and organelle transport, cytoskeleton dynamics, morphogenesis, polarized growth, cell movements, spindle formation, chromosome movement, nuclear fusion, and signal transduction. Three families of non-plant molecular motors (kinesins, dyneins, and myosins) have been characterized. Kinesins and dyneins use microtubules, while myosins use actin filaments as tracks to transport materials intracellularly. A large number (about 40) of kinesin and myosin motors have been identified in A. thaliana, although little is known about plant molecular motors and their roles in cell division, cell expansion, cytoplasmic streaming, cell-to-cell communication, membrane trafficking, and morphogenesis. Calcium, through the calcium binding protein calmodulin, is thought to play a key role in regulating the function of both microtubule- and actin-based motors in plants (molecular motors are reviewed in Reddy, 2001). The kinesin-like calmodulin (CaM) binding protein (KCBP), a minus end-directed microtubule motor protein unique to plants, has been implicated in cell division. During nuclear envelope breakdown and anaphase, activated KCBP-promotes the formation of a converging bipolar spindle by sliding and bundling microtubules, while KCBP activity is down-regulated by Ca²⁺ and CaM during metaphase and telophase (Vos et al., 2000). The prey protein OsPN29946 is a kinesin-like protein likely involved in microtubule movements and its association with OsE2F1 suggests that this interaction can represent a step in the control of cell-cycle dependent events involving cytoskeleton organization.

[0502] OsE2F1 was also found to interact with novel protein OsPN30852. A BLAST analysis of the 86-amino acid sequence of OsPN30852 indicated that this protein is similar to an unknown protein from A. thaliana (GENBANK® Accession No. AAK48957.1, 80% identity, 4e⁻³¹). Analysis of gene expression in plants indicated that this gene is up-regulated by stress and by abscisic acid and jasmonic acid (JA).

Two-Hybrid System Using Os018989-4003 as Bait

[0503] Hypothetical protein Os018989-4003, which is similar to Triticum sp. DP Protein, was used as bait in the two-hybrid assay. This protein is described as an interactor for OsE2F1 earlier in this Example. The bait clone used in the screen encoded amino acids 90 to 220 of Os018989-4003.

[0504] The bait fragment encoding amino acids 90 to 220 of Os18989-4003 was found to interact with OsE2F1 (see description above). The interaction of Os018989-4003 with OsE2F1 confirms the interaction between the same proteins in the reverse bait and prey roles described earlier in this Example.

[0505] Os18989-4003 was also found to interact with OsE2F2. OsE2F2 is a protein of 393 amino acids that includes a transcription factor E2F/dimerization partner (TDP; amino acids 74 to 300). A BLAST analysis indicated that this protein is the rice E2F homolog (GENBANK® Accession No. BAB20933, 100% identity, e=0.0), a member of the E2F transcription factor family. E2F transcription factor family members have been described herein. OsE2F2 is translated from one of two alternatively spliced mRNA species (identified in this study) and, like other E2F family members, it likely regulates transcription of genes encoding proteins involved in cell cycle progression in rice.

[0506] The splicing variant of OsE2F2, OsE2F2 (367), has a sequence of 367 amino acids that includes a predicted transcription factor E2F/dimerization partner (TDP; amino acids 84 to 310, e⁻³⁹ prediction value). A BLAST analysis of its amino acid sequence determined that it is the rice E2F homolog (GENBANK® Accession No. BAB20933, 100% identity, e=0.0). OsE2F2 (367) was also used as a bait in this study and found to interact with the following two DP proteins (these interactions are shown in Table 3):
[0507] a) Hypothetical protein 018989-4003 (Os018989-4003, described above), which is similar to Triticum sp. DP Protein. The OsE2F2 (367)-Os018989-4003 interaction validated the interaction between the same DP protein, namely 018989-4003, and OsE2F2.
[0508] b) Protein PN31182 (OsPN31182), which is similar to A. thaliana DP-Like Protein. OsPN31182 is a novel protein of 379 amino acids. A BLAST analysis indicated that the amino acid sequence of OsPN31182 is similar to A. thaliana Putative Protein (top hit, GENBANK® Accession No. NP_{—}568116.1, 70% identity, 5e⁻¹⁰⁸) and DP-Like Protein (third hit, GENBANK® Accession No. CAC15483.1, 50% identity, 9e⁻⁵⁵), and to DP-like proteins from other organisms. OsPN31182 is thus a novel rice DP protein.

[0509] DP proteins heterodimerize with E2F transcription factors to regulate the transcription of genes encoding proteins that are important for cell cycle progression. This notion is consistent with the interactions identified here between the rice E2F homolog OsE2F2 (367) and the DP-like proteins Os018989-4003 and OsPN31182. It is likely that these interactions participate in cell cycle progression in rice.

[0510] Os18989-4003 was also found to interact with OsAAG13527, an 859-amino acid protein determined by BLAST analysis to be the rice Kinesin-Like Protein (GENBANK® Accession No. AAG13527.1, 100% identity, e=0.0). Kinesins are molecular motors associated with microtubule movement during diverse cellular events, and have been described herein.

[0511] Os18989-4003 was also found to interact with the putative myosin heavy chain protein OsAAK72891. A BLAST analysis of the OsAAK72891 amino acid sequence determined that this protein is the rice Putative Myosin Heavy Chain (GENBANK® Accession No. AAK72891.1, 100% identity, e=0.0).

[0512] Members of the myosin family participate in many types of cellular motility in all eukaryotic cells. Myosins are cytoskeletal proteins that function as molecular motors to generate movement and mechanical force in ATP-dependent interactions with actin filaments in various cellular events. The superfamily of myosin proteins has been divided into at least 14 classes (designated I to XIV) on the basis of their conserved ATPase- and actin-binding regions, each myosin containing tail domains believed to be responsible for the specific subcellular localization and function of these motors (reviewed in Reichelt et al., 1999). Molecular motors are involved in diverse cellular functions such as vesicle and organelle transport, cytoskeleton dynamics, morphogenesis, polarized growth, cell movements, spindle formation, chromosome movement, nuclear fusion, and signal transduction (molecular motors are reviewed in Reddy, 2001). While the role of myosins in animal and unicellular organisms is well established in muscular contraction, cytokinesis, and membrane-associated functions such as vesicle transport and membrane dynamics, little is known about myosins and other molecular motors in plants and their roles in cell division, cell expansion, cytoplasmic streaming, cell-to-cell communication, membrane trafficking, and morphogenesis (Reddy, 2001).

[0513] Myosins in higher plants are thought to participate as motors in intracellular transport of organelles and vesicles associated with cytoplasmic streaming and in tip-growing cells of pollen tubes (reviewed in Yokota et al., 1999b). The active sliding of myosin heavy chain along actin filaments provides the motor force for cytoplasmic streaming (i.e., the constant movement of the cytoplasm and suspended organelles, membrane systems and molecules which is observed in plant cells), and the myosin activity is regulated by calcium through the calcium-binding protein calmodulin (Yokota et al., 1999a; Yokota et al., 1999b). The function of cytoplasmic streaming and the mechanisms of its biochemical regulation are not known, although it is thought to facilitate the exchange of materials within the cell and between the cell an its environment. Specific movement and anchoring of some organelles is also known to depend on actin filaments and is thus thought to involve myosin, but these mechanisms have not been documented (myosins are discussed in Buchanan et al., 2002, at page 221). Additionally, Reichelt et al., 1999 localized a plant myosin VIII at the post-cytokinetic cell wall, suggesting a role for this protein in cytokinesis, specifically in maturation of the cell plate and reestablishment of cytoplasmic actin cables at sites of intercellular communication. Based on current knowledge of plant myosins, the rice heavy chain myosin OsAAK72891 can be a cytoskeletal component that participates in cytoplasmic streaming events in a cell-cycle-dependent manner.

[0514] Os18989-4003 was also found to interact with OsMADS14 (GENBANK® Accession No. AF058697), a 246-amino acid protein that includes a MADS box domain (amino acids 1 to 61). Moon et al. report that OsMADS14 is homologous to the maize AP1 homolog ZAP1 and classify it as a member of the SQUAMOSA-like (SQUA) subfamily in the AP1/AGL9 family of MADS box genes, which control the specification of meristem and organ identity in developing flowers (Moon et al., 1999). OsMADS14 was expressed from the early through the later stages of flower development, with transcripts detectable in sterile lemmas, paleas/lemmas, stamens, and carpels of mature flowers. Moon et al. suggested that this gene regulates a very early stage of flower development, based on their observation that transgenic plants ectopically expressing OsMADS14 exhibit extreme early flowering and dwarfism (Moon et al., 1999). MADS box proteins are known to regulate transcription as heterodimers or ternary complexes that include other MADS box proteins, and these interactions are thought to occur through the K box present in MADS proteins (Lim et al., 2000, Moon et al., 1999).

[0515] Because MADS box proteins are known to mediate various plant developmental processes as heterodimers or trimers, and given the involvement of the DP protein Os018989-4003 in the regulation of genes required for cell cycle progression, it is likely the interaction between the MADS box protein OsMADS14 and Os018989-4003 represents a newly characterized interaction that regulates transcription of genes associated with plant development in rice.

[0516] OsMADS14 was also found to interact with the MADS box protein OsMADS45 (GENBANK® Accession No. AAB50180; see Table 4). OsMADS45 is a 249-amino acid protein that includes a MADS box domain (amino acids 1 to 61) and two coiled coils (amino acids 83 to 117 and amino acids 152 to 176); the coiled coils are likely part of a K-box predicted between amino acids 73 and 176. The OsMADS45 gene, identified by Greco et al., 1997, encodes a protein highly homologous to the products of Arabidopsis AGL2 and AGL4 MADS box genes. Temporal and spatial RNA expression patterns suggest that the rice OsMADS45 and Arabidopsis AGL2 and AGL4 play similar roles in flower development (Greco et al., 1997), specifically in the development of all floral organs by acting as intermediates between the meristem identity and organ identity genes (Savidge et al., 1995).

[0517] A BLAST analysis comparing the nucleotide sequence of OsMADS45 against TMRI's GENECHIP® Rice Genome Array sequence database identified probeset OS014912_f_at (6e⁻⁶⁴ expectation value) and probeset OS000555_f_at (6e⁻⁶⁰) as the closest matches. Analysis of gene indicated that these genes are expressed early in seed development.

[0518] Os18989-4003 was also found to interact with OsPN22824, a 500-amino acid protein fragment. A BLAST analysis of the OsPN22824 amino acid sequence revealed no high similarity with any of the proteins in the Genpept database. The most similar amino acid sequences are six plant proteins of unknown function, the top hit being A. thaliana Expressed Protein (GENBANK® Accession No. NP_{—}564015.1, 33% identity, 5e⁻⁴⁵), and A. thaliana Myosin Heavy-Chain-Like (seventh hit, GENBANK® Accession No. BAA97502, 29% identity, e⁻⁰¹⁶). In agreement with these results, the most similar protein in Myriad's database is human Myosin, Heavy Chain lix/d, Skeletal Muscle (MyHC-lix/d; 23% identity, e=0.004).

[0519] OsPN22824 was also found to interact with rice Small GTP-Binding Protein RACDP (OsRACD; GENBANK® Accession No. AAF28764; see Table 5). OsRACD is a 197-amino acid protein that includes an ATP/GTP-binding site motif A (P-loop, amino acids 13 to 20) and a prenyl group binding site (CAAX box, amino acids 194 to 197). Analysis of the amino acid sequence by SMART identified a Rho (Ras homology) signature (amino acids 9 to 180, 6e⁻¹¹⁶), while analysis by Pfam predicted nearly the same region to be a Ras family signature (amino acids 8 to 197, 2.3e⁻⁷⁸). These predictions indicate that OsRACD is a member of the Rho subfamily of Ras-like small GTPases. Hydrolysis of GTP to GDP is an important step in many intracellular signal transduction pathways that control various cellular processes such as cell growth and development, apoptosis, lipid metabolism, cytoarchitecture, membrane trafficking, and transcriptional regulation (Aznar & Lacal, 2001). The rice OsRACD protein has not been described, however, other members of the Rho subfamily have been characterized. Cdc42, Rac, and Rho isoforms regulate the assembly and disassembly of the actin cytoskeleton in response to extracellular signals (Tapon & Hall, 1997). Plant small GTPase Rac homologs are components of the oxidative burst associated with disease resistance (Ono et al., 2001; Dwyer et al., 1996). OsRACD is a rice GTPase that likely participates in signal transduction involving GTP hydrolysis, and its association with the myosin-like protein OsPN22824 suggests that this GTPase activity occurs during events related to organization of the actin cytoskeleton as part of either plant development and/or response to pathogen invasion.

Summary

[0520] OsE2F1 interacts with four novel rice proteins, two of which are DP-like proteins (Os018989-4003 and OsPN26539). In addition, the DP prey protein Os018989-4003 interacts with the E2F2 homolog splicing variant OsE2F2 (367) and, when used as bait, with both rice OsE2F1 and OsE2F2 homologs. OsE2F2 (367) also interacts with another novel DP-like protein, OsPN31182. The identification of these new DP proteins interacting with E2F proteins in rice is in accord with the presence of E2F and DP homologs identified previously in plants (reviewed in Kosugi & Ohashi, 2002). Plant E2F and DP proteins exhibit binding activities similar to those of animal E2F transcription factors, which function as heterodimeric complexes with DP or other E2F-like proteins (reviewed in Trimarchi & Lees, 2002; Magyar et al., 2000). The associations between the rice E2F and DP homologs identified in this Example are consistent with the subunit composition of E2F/DP transcription factors and provide further evidence that plant E2F-like genes are functionally equivalent to their mammalian homologs. It is likely that these interactions participate in cell cycle progression in rice.

[0521] Animal E2F/DP transcription factors play a central role in the control of the G1/S transition through integration of the activities of important regulators of the cell cycle with the transcription apparatus. The G1/S control point in plants is thought to be at least partly regulated by molecules similar to those found in animals, such as D-type cyclins, RB-related proteins, and E2F-like proteins (reviewed in Magyar et al., 2000). The G1 phase, which precedes the S phase, is a period of intense biochemical activity in which cells expand, double in size, and synthesize molecules and structures, including microtubules and other cytoskeletal structures, in preparation for cell division. The end of G1 is an important checkpoint in the control of cell cycle progression, at which the control system either arrests the cycle or triggers initiation of S phase (the plant cell cycle phases are discussed in Raven et al., 1999). OsE2F1 and the DP protein Os018989-4003 were found to interact with several cytoskeletal structural proteins, and this finding supports the notion that the rice E2F/DP transcription factor has a role in controlling events related to cell cycle progression. Two of these interactors are kinesin-like proteins: a novel rice kinesin-like protein (OsPN29946, interactor for OsE2F1) and rice kinesin-like protein annotated in the public domain (OsAAG13527, interactor for Os018989-4003).

[0522] Two additional cytoskeletal components interacting with the DP protein Os018989-4003 are myosin heavy-chain proteins: putative myosin heavy chain (OsAAK72891) and a novel rice myosin heavy-chain-like protein (OsPN22824). Kinesins and myosins are molecular motors that use microtubules (in the case of kinesins) or actin filaments (in the case of myosins) as cytoskeletal tracks to transport cargo materials intracellularly. Molecular motors, including kinesins, myosins and dyneins, have been well characterized in non-plant organisms and implicated in a variety of cellular functions such as vesicle and organelle transport, cytoskeleton dynamics, morphogenesis, polarized growth, cell movements, spindle formation, chromosome movement, nuclear fusion, and signal transduction. In contrast, the roles of the many kinesins and myosins identified in plants are largely unknown (molecular motors are reviewed in Reddy, 2001). A few studies suggest that myosin heavy-chain in higher plants participates in intracellular transport of organelles and vesicles (along actin filaments) associated with cytoplasmic streaming and in tip-growing cells of pollen tubes (reviewed in Yokota et al., 1999b). An unconventional class VIII plant myosin has been implicated in maturation of the cell plate at cytokinesis (Reichelt et al., 1999). However, the function and regulation of plant motors in cell division, cell expansion, cytoplasmic streaming, cell-to-cell communication, membrane trafficking, and morphogenesis remains to be elucidated (Reddy, 2001). Based on functional homology with animal and plant E2F proteins, which are known to participate in regulation of the G1/S transition phase, it appears that the interactions of the rice OsE2F1 and DP protein Os018989-4003 with the kinesin-like and myosin-like prey proteins identified herein represent transcriptional regulation of cell-cycle-dependent events involving cytoskeleton organization/function and possibly occurring during the G1/S transition.

[0523] Cell cycle regulators in plants must couple control of cell cycle phases to the environmental and developmental factors that affect plant growth and development. In agreement with this notion, the DP protein Os018989-4003 interacts with a protein known to regulate plant development, the MADS box protein MADS14 (OsMADS14), which in turn interacts with the MADS box protein OsMADS45. MADS box proteins mediate various plant developmental processes and, like other transcription factors, function as heterodimers or ternary complexes (for reviews, see Riechmann & Meyerowitz, 1997; Moon et al., 1999; Theissen et al., 2000). Additional interactions identified for MADS box proteins are discussed below in Example IV. The products of MADS box genes interact with each other and with other gene products participating in the genetic control of various plant development processes, with regulatory interactions (activation, repression) between the different genes/groups of genes within this network. Likewise, E2F-like proteins regulate transcription as heterodimeric complexes, and their activity is regulated by interactions with other cellular proteins (Trimarchi & Lees, 2002; Kosugi & Ohashi, 2002). Given the presumed involvement of the DP protein Os018989-4003 in the regulation of genes required for cell cycle progression; it is likely that the interaction between the DP protein Os018989-4003, possibly in heterodimer form with OsE2F1 or OsE2F2 and the MADS box protein OsMADS14, is involved in transcriptional regulation of genes important in plant development in a cell-cycle dependent fashion in rice, and that these developmental processes can occur during the G1/S phase of the cell cycle.

[0524] The fourth interactor identified for E2F1 is a protein of unknown function (OsPN30852). However, based on its association with rice E2F1 and on the presumed role of the latter in regulation of cell cycle progression, it is likely that OsPN30852 is involved in cell cycle regulation.

[0525] The rice proteins found to interact with the rice E2F and DP homologs OsE2F1 and Os018989-4003 appear to be involved in regulation of the cell cycle/plant development. Some of these interactors are newly characterized rice proteins, and their interactions with OsE2F1 and Os018989-4003 represent molecular mechanisms for E2F-mediated transcriptional regulation of the cell cycle in rice that have not been previously described.

### Example II

[0526] This Example provides newly characterized rice proteins interacting with rice cyclin OsS49462 and cyclin OsCYCOS2 identified by means of yeast two-hybrid assays.

[0527] As discussed in Example I, cyclins are regulatory proteins required to activate cyclin-dependent protein kinases (CDKs). Cyclins are classified into two groups: mitotic cyclins, which include A-type and B-type cyclins (also known as S and M cyclins, respectively), which are essential for the control of the cell cycle at the G2/M (mitosis) transition, and G1 cyclins, which include D- and E-type cyclins, which are essential for the control of the cell cycle at the G1/S (start) transition. G2/M cyclins accumulate steadily during G2 and are abruptly destroyed as cells exit from mitosis (at the end of the M-phase).

[0528] B-type cyclins contain a large conserved central domain, the cyclin box, which interacts with the kinase subunit, and a domain called mitotic destruction box, which mediates cyclin degradation late in mitosis. B-type cyclins are expressed specifically in late G2 and early M phase of the cell cycle. They regulate the cell cycle progression from G2 to mitosis during plant development, and Myb-type transcription factors can be involved in this regulation (reviewed by Doonan et al., 1997). B-type cyclins of rice plants accumulate steadily during G2 and then are rapidly degraded at mitosis (Umeda et al., 1999). The B-type cyclins OsS49462 and OsCYCOS2 share 75.1% sequence identity at the amino acid level and are both encoded by mRNAs of 1.6 kb, as reported by Sauter et al., 1995. Expression of OsCYCOS2 is induced by the plant hormone gibberellin (GA) in the intercalary meristem of deepwater rice (Oryza sativa L.) internodes, and that the time course of OsCYCOS2 induction is compatible with a role for both cyclins in regulating the G2/M phase transition (Sauter et al., 1995). GA promotes rapid internodal growth in this plant subspecies, and this growth occurs through signaling events requiring cell cycle induction at the G2/M transition. Thus, GA promotes the activity of p34cdc2/CDC28-like histone H1 protein kinase, an enzyme known to regulate mitosis, and that the increase in this protein kinase activity is mediated by OSCYCOS2. The cyclins were expressed in the intercalary meristem and the elongation zone of the internode, but the GA-induced increase in transcript levels was restricted to the meristem only (Sauter et al., 1995).

[0529] Thus, OsS49462 and OsCYCOS2 are B-type mitotic cyclins that regulate the cell cycle progression from G2 to mitosis. The protein interactions involving OsS49462 and OsCYCOS2 identified in this Example are useful for elucidating the mechanisms of cell cycle regulation in plants. Proteins that participate in cell cycle regulation in rice can be targets for genetic manipulation or for compounds that modify their level or activity, thereby modulating the plant cell cycle. The identification of genes encoding these proteins can allow genetic manipulation of crops or application of compounds to effect agronomically desirable changes in plant development or growth.

Results

[0530] Cyclin OsS49462 was found to interact with a rice hypothetical protein of unknown function (OsPN25358) and with four novel rice proteins: a putative RNA-binding protein (OsPN30848) and a zinc finger protein (OsPN29942), a myosin-like protein (OsPN23484) and an unknown protein (OsPN29957). Two of these proteins (OsPN23484 and OsPN29942) also interact with the second bait, cyclin OsCYCOS2.

[0531] Cyclin OsCYCOS2 was found to interact with seven known rice proteins and with 18 novel rice proteins. The known interactors include a putative CCAAT displacement protein whose function as a transcriptional regulator is cell cycle-dependent (PN26210); a putative myosin heavy chain, a cytoskeletal protein that likely functions as a molecular motor to move actin filaments in events related to cell polarity or cytokinesis (PN23297); a chloroplast ATPase I subunit (PN23416); a syntaxin related protein (PN23136); a heat shock protein (PN23169); a cora-like Mg transporter (PN25381) and a hypothetical protein of unknown function (PN23363). Among the novel interactors identified are several proteins with putative roles in cytoskeletal function: four putative myosin heavy-chain proteins (PN23484, PN20815, OsPN29882, and OsPN29966); two kinesin-like proteins with a putative microtubule motor function during cell division (the calmodulin-binding protein OsPN23390 and the centromere/kinetochore protein OsPN29965); a spectrin-like protein with a presumed actin-binding function/nuclear matrix protein (OsPN29956); a putative Mg transporter (OsPN29970), a centromere homolog (PN29958) and a zinc finger protein (PN29942). Other novel interactors include a protein similar to A. thaliana ARM repeat-containing protein with a possible role in cell adhesion and/or signaling (OsPN23274); a chaperone heat shock protein (PN30899); and 6 proteins of unknown function (OsPN29961, OsPN29969, OsPN26688, OsPN29967, OsPN29968, OsPN30854), two of which (OsPN23484 and OsPN29942) also interact with the cyclin OsS49462 bait.

[0532] The interacting proteins of the Example are listed in Table 6 and Table 7 below, followed by detailed information on each protein and a discussion of the significance of the interactions. The nucleotide and amino acid sequences of the proteins of this Example are provided in SEQ ID NOs: 15-53 and 209-221.

[0533] Some of the proteins identified represent rice proteins previously uncharacterized. Based on their predicted biological function and on the ability of the prey proteins to specifically interact with cyclin OsS49462 and cyclin OsCYCOS2, the interacting proteins are likely part of a protein network involved in the cyclin-mediated regulation of the cell cycle.

TABLE 6
Interacting Proteins Identified for OsS49462 (Cyclin OsS49462, fragment)
The names of the clones of the proteins used as baits and found as preys are given.
Nucleotide/protein sequence accession numbers for the proteins of the Example (or related
proteins) are shown in parentheses under the protein name. The bait and prey coordinates
(Coord) are the amino acids encoded by the bait fragment(s) used in the search and by the
interacting prey clone(s), respectively. The source is the library from which each prey clone
was retrieved.

| | | | |
|---|---|---|---|
| | Protein Name | | Prey Coord |
| Gene Name | (GENBANK ® Accession No.) | Bait Coord | (source) |

BAIT PROTEIN

| | | |
|---|---|---|
| OsS49462 PN20325 | O. sativa Cyclin OsS49462, | 1-243 |
| (6331703- | Fragment (X82035) | 50-150 |
| OS002997) | | 100-243 |
| (SEQ ID NO: 206) | | |

INTERACTORS

| | | | |
|---|---|---|---|
| PN25358 | Hypothetical Protein AAK39589 | 1 to 100 | 2 × 303-472 |
| 13786464 | | | (output trait) |
| (SEQ ID NO: 208) | | | |
| OsPN23484 | Novel Protein PN23484, heavy meromyosin | 1 to 100 | 111-194 |
| Novel | | | (output trait) |
| (CONTIG1447_FASTA.CONTIG1) | | | |
| (SEQ ID NO: 16) | | | |
| OsPN29942 | Novel Protein PN29942, | 1 to 100 | 11-182 |
| novel | Fragment, zinc finger protein | | (output trait) |
| (SEQ ID NO: 18) | | | |
| OsPN29957 | Novel Protein PN29957, | 1 to 100 | 2 × 51-288 |
| novel | Fragment, unknown | | 28-214 |
| (SEQ ID NO: 20) | | | (output trait) |
| OsPN30848 | Novel Protein PN30848, | 1 to 100 | 365-476 |
| novel | Fragment, RNA binding protein | | (input trait) |
| (SEQ ID NO: 22) | | | |

[0534] TABLE 7
Interacting Proteins Identified for OsCYCOS2 (O. sativa Cyclin OsCYCOS2)
The names of the clones of the proteins used as baits and found as preys are given.
Nucleotide/protein sequence accession numbers for the proteins of the Example (or related
proteins) are shown in parentheses under the protein name. The bait and prey coordinates
(Coord) are the amino acids encoded by the bait fragment(s) used in the search and by the
interacting prey clone(s), respectively. The source is the library from which each prey clone
was retrieved.

| | | | |
|---|---|---|---|
| | Protein Name | | Prey Coord |
| Gene Name | (GENBANK ® Accession No.) | Bait Coord | (Source) |

BAIT PROTEIN

| | | |
|---|---|---|
| OsCYCOS2 | O. sativa Cyclin OsCYCOS2 | 1-150 |
| PN20257 (1694891- | (X82036) | 100-275 |
| OS003088 | | 140-350 |
| (SEQ ID NO: 210) | | 300-420 |
| | | 1-420 |

INTERACTORS

| | | | |
|---|---|---|---|
| PN30899 | Hypothetical Protein 000221- | 50-233 | 4 to 228 |
| 417154 | 3976 Similar to OsHP82, | | (output trait) |
| (SEQ ID NO: 24) | Fragment | | |
| PN29970 | Putative CorA-like Mg²⁺ | 50 to 233 | 1-158 |
| (SEQ ID NO: 26) | Transporter Protein | | (output trait) |
| PN23363 | O. sativa Hypothetical Protein | 50 to 233 | 50-148 |
| 13324791 | 13324791 | | (input trait) |
| (SEQ ID NO: 212) | | | |
| PN26210 | O. sativa Putative CCAAT | 170 to 310 | 422 to 646 |
| 13702813 | Displacement Protein | | 2 × 364 to 613 |
| (SEQ ID NO: 214) | | | (output trait) |
| 15451591 | O. sativa Putative Myosin | 50 to 233 | 980 to 1160 |
| PN23297 | Heavy Chain | | (input trait) |
| (SEQ ID NO: 216) | | | |
| PN23416 | Chloroplast ATPase I Subunit | 50 to 233 | 130 to 176 |
| 11466783 | | | (input trait) |
| (SEQ ID NO: 218) | | | |
| PN23136 | Hypothetical Protein BAA85200 | 50 to 233 | 66 to 191 |
| 5922624 | Similar to Syntaxin Related | | (output trait) |
| (SEQ ID NO: 220) | Protein AtVam3p | | |
| PN20815 | Hypothetical Protein PN20815 | 170 to 310 | 1 to 134 |
| Novel (3210- | Similar to A. thaliana Myosin | | (output trait) |
| OS_ORF019753) | Heavy Chain, Fragment | | |
| (SEQ ID NO: 28) | | | |
| OsPN23274 | Novel Protein PN23274, Similar | 50 to 233 | 6 × 79 to 210 |
| Novel | to A. thaliana ARM Repeat- | | (input trait) |
| (CONTIG697.FASTA.CONTIG2/ | Containing Protein | | |
| CONTIG697.FASTA.CONTIG1) | | | |
| (SEQ ID NO: 30) | | | |
| OsPN23390 | Novel Protein PN23390, | 50 to 233 | 595 to 845 |
| novel | Putative Kinesin-like | | 576 to 738 |
| (SEQ ID NO: 32) | Calmodulin Binding Protein, | | (output trait) |
| | Fragment | | |
| OsPN23484 Novel | Novel Protein PN23484, heavy | 170 to 310 | 77 to 233 |
| (CONTIG1447.FASTA.CONTIG1) | meromyosin | | 2 × 64 to 212 |
| | | | 90 to 245 |
| (SEQ ID NO: 16) | | | (output trait) |
| OsPN26688 Novel | Novel Protein PN26688, | 50 to 233 | 132 to 225 |
| (CONTIG3772.FASTA.CONTIG1) | unknown | | (input trait) |
| (SEQ ID NO: 34) | | | |
| OsPN29882 | Novel Protein PN29882, | 50 to 233 | 107 to 273 |
| novel | Fragment, myosin heavy chain | | (output trait) |
| (SEQ ID NO: 36) | | | |
| OsPN29942 Novel | Novel Protein PN29942, | 170 to 310 | 1 to 159 |
| (CONTIG3164.FASTA.CONTIG1) | Fragment, zinc finger protein | | (output trait) |
| (SEQ ID NO: 18) | | | |
| OsPN29956 | Novel Protein PN29956, | 50 to 233 | 2 × 96 to 235 |
| novel | Fragment, nuclear matrix | | 2 to 373 |
| (SEQ ID NO: 38) | constituent | | (output trait) |
| OsPN29958 | Novel Protein PN29958, | 50 to 233 | 3 to 304 |
| novel | Fragment, centromere | | (output trait) |
| (SEQ ID NO: 40) | homologue | | |
| OsPN29961 | Novel Protein PN29961, | 50 to 233 | 10 to 215 |
| novel | Fragment, Similar to A. thaliana | | (output trait) |
| (SEQ ID NO: 42) | Unknown Protein BAB02349 | | |
| OsPN29965 | Novel Protein PN29965, | 50 to 233 | 12 to 124 |
| novel | Fragment, Similar to A. thaliana | | (output trait) |
| (SEQ ID NO: 44) | Kinesin (Centromere Protein)- | | |
| | Like Heavy Chain-Like Protein | | |
| | BAB03114 | | |
| OsPN29966 | Novel Protein PN29966, | 50 to 233 | 8 to 216 |
| novel | Fragment, myosin heavy chain | | (output trait) |
| (SEQ ID NO: 46) | | | |
| OsPN29967 | Novel Protein PN29967, | 50 to 233 | 3 × 16 to 174 |
| novel | Fragment, unknown | | (output trait) |
| (SEQ ID NO: 48) | | | |
| OsPN29968 | Novel Protein PN29968, Similar | 50 to 233 | 12 to 113 |
| novel | to A. thaliana Unknown Protein | | (output trait) |
| (SEQ ID NO: 50) | BAB01990 | | |
| OsPN29969 | Novel Protein PN29969, Similar | 50 to 233 | 2 × 16 to 123 |
| novel | to A. thaliana Unknown Protein | | (output trait) |
| (SEQ ID NO: 52) | BAB01990 | | |
| OsPN25381 | Protein 13357265 Putative | 50 to 233 | 30-218 |
| 13357265 | CorA-like Mg²⁺ Transporter | | (output trait) |
| (SEQ ID NO: 222) | Protein | | |
| OsPN30854 Novel | Novel Protein PN30854, | 170 to 310 | 100 to 169 |
| (CONTIG962.FASTA.CONTIG1) | unknown | | (output trait) |
| (SEQ ID NO: 54) | | | |
| OsPN30899 | Novel Protein PN30899, DNAJ | 50 to 233 | 4 to 228 |
| novel | | | (output trait) |
| (SEQ ID NO: 24) | | | |

Two-Hybrid System Using OsS49462 as Bait

[0535] The bait OsS49462 (GENBANK® Accession No. X82035; Sauter et al., 1995) is a 242-amino acid protein that contains a cyclin, N-terminal domain (amino acids 1 to 105, 7.1e⁻⁴⁹) and a cyclin C-terminal domain (amino acids 107 to 227, e⁻⁵⁰), as determined by analysis of the amino acid sequence. Like OsCYCOS2 (described as a bait below in this Example), OsS49462 is a rice B-type cyclin protein.

[0536] A BLAST analysis comparing the nucleotide sequence of OSS49462 against TMRI's GENECHIP® Rice Genome Array sequence database identified probeset OS002997.1_s_at (e=0 expectation value) as the closest match. Analysis of gene expression indicated that this gene is not specifically expressed in several different tissue types and is not specifically induced by a broad range of plant stresses, herbicides, or applied hormones.

[0537] The bait protein encoding amino acids 1 to 100 of OsS49462 (which contains the cyclin, N-terminal domain) was found to interact with hypothetical protein AAK39589 (PN25358). Two prey clones encoding amino acids 303 to 472 of PN25358 were retrieved from the output trait library. PN25358 is a 472-amino acid protein that includes a transmembrane domain (amino acids 403 to 419), as predicted by analysis of the amino acid sequence. A BLAST analysis against the Genpept database determined that it is similar to a rice unknown protein (GENBANK® Accession No. AAK39589, e=0) and to an A. thaliana putative protein (GENBANK® Accession No. NP_{—}199010.1, 64% identity, 7e⁻¹⁶¹). BLAST analysis of the PN25358 amino acid sequence against Myriad's proprietary database found no significant similarities for this protein. Since PN25358 interacts with OsS49462, it might be involved in cell cycle regulation.

[0538] The bait protein encoding amino acids 1 to 100 of OsS49462 was also found to interact with novel protein OsPN23484. (One prey clone encoding amino acids 111 to 194 of OsPN23484 was retrieved from the output trait library) BLAST analysis suggests that PN23484 is a heavy meromyosin protein. Novel protein OsPN23484 also interacts with the bait OsCYCOS2 (described below in this Example). This observation validates the OsS49462-OsPN23484 interaction and suggests that OsPN23484 plays a broad role in regulation by cyclins and thus in the control of cell cycle progression.

[0539] The bait protein encoding amino acids 1 to 100 of OsS49462 was also found to interact with a fragment of the novel protein OsPN29942 (one prey clone encoding amino acids 11 to 182 of OsPN29942 was retrieved from the output trait library). OsPN29942 is a protein for which the complete amino acid sequence is not known. Analysis of the available 183 amino acids identified a BTB/POZ domain (amino acids 1 to 85). This domain is found primarily at the N terminus of zinc finger proteins and is evolutionarily conserved from Drosophila to mammals (Zollman, et al., 1994). This region can affect the DNA-binding activity of zinc finger proteins (Bradwell et al., 1994). A BLAST analysis against the Genpept database indicated that OsPN29942 shares 62% identity with an unknown protein from A. thaliana (GENBANK® Accession No. AAF00643, 5e⁻⁵³).

[0540] OsPN29942 also interacts with the bait OsCYCOS2 as described later in this Example. This observation validates the OsS49462-OsPN29942 interaction and suggests that OsPN29942 plays a broad role in regulation by cyclins and thus in the control of cell cycle progression.

[0541] The bait protein encoding amino acids 1 to 100 of OsS49462 was also found to interact with OsPN29957. Three prey clones, two encoding amino acids 51 to 288 and one encoding amino acids 28 to 214 of OsPN29957 were retrieved from the output trait library. OsPN29957 is a protein for which the complete amino acid sequence is not known. Upon analysis of the available 328 amino acids. A BLAST analysis against the Genpept database indicated that OsPN29957 shares 69% identity with an A. thaliana unknown protein (GENBANK® Accession No. NP_{—}175186, e⁻²²). The available information makes it difficult to determine the function of OsPN29957. Discovery of the complete amino acid sequence is likely to clarify the biological role of this protein and of its interaction with OsS49462.

[0542] The bait protein encoding amino acids 1 to 100 of OsS49462 was also found to interact with PN30848 (one prey clone encoding amino acids 365 to 476 of OsPN30848 was retrieved from the input trait library). OsPN30848 is a protein for which the complete amino acid sequence is not known. Analysis of the available 497 amino acids identified two putative RNA-binding regions (amino acids 162 to 169 and amino acids 243 to 250). A BLAST analysis against the Genpept database indicated that OsPN30848 shares 50% identity with two A. thaliana putative RNA-binding proteins (GENBANK® Accession No. NP_{—}190834, 2e⁻⁹⁷ and GENBANK® Accession No. AAK32943, e⁻⁹⁴) and another A. thaliana protein similar to nucleolin (GENBANK® Accession No. AAB62861, 46% identity, 5e⁻⁸⁹. Nucleolin is important for ribosome biogenesis and possesses RNA-binding activity. The similarity of OsPN30848 and nucleolin suggests a similar role for OsPN30848. The interaction of OsPN30848 with OsS49462 can alter cell cycle progression by regulating this activity.

[0543] A BLAST analysis comparing the nucleotide sequence of OsPN30848 against TMRI's GENECHIP® Rice Genome Array sequence database identified probeset OS_ORF013388_at (e⁻¹⁰⁸ expectation value) as the closest match. Gene expression analysis indicated that this gene is not specifically expressed in several different tissue types and is not specifically induced by a broad range of plant stresses, herbicides, or applied hormones.

Two-Hybrid System Using OsCYCOS2 as Bait

[0544] The 419-amino acid protein OsCYCOS2 (GENBANK® Accession No. X82036; Sauter et al., 1995) is a G2/M type cyclin. Analysis of the OsCYCOS2 amino acid sequence identified two cyclin domains spanning amino acids 200 to 284 (2.7e⁻²⁶) and amino acids 297 to 379 (1.29e⁻²²). Type G2/M cyclins regulate the cell cycle progression from G2 to mitosis during plant development. The role of these proteins has been discussed earlier in this Example with regard to the bait OsS49462.

[0545] A BLAST analysis comparing the nucleotide sequence of OsCYCOS2 against TMRI's GENECHIP® Rice Genome Array sequence database identified probeset OS003088.1_at (e=0 expectation value) as the closest match. Gene expression analysis indicated that this gene is specifically expressed in panicle.

[0546] The bait encoding amino acids 50 to 233 of OsCYCOS2 was found to interact with a fragment of the hypothetical protein 00221-3976 (PN30899). One prey clone encoding amino acids 4 to 228 of PN30899 was retrieved from the input trait library. BLAST analysis indicates that PN30899 is most likely a heat shock (chaperone) protein (Oryza sativa protein 417154 HSP82). While heat shock proteins (HSPs) have been ascribed a main role in the plant stress response, some of these proteins are designated as HSPs solely based on sequence homology and their functions in plants have not been demonstrated in vitro. Indeed, some HSPs are expressed throughout development. HSPs function as molecular chaperones that promote proper protein folding and can have roles not related to the stress response. HSP70 proteins, for instance, are essential for normal cell function. They are ATP-dependent molecular chaperones that can interact with many different proteins, given their role in protein folding, unfolding, assembly, and disassembly. These topics are discussed in Buchanan et al., 2002. The heat shock protein HSP70 in sea urchin cells has been proposed to have a chaperone role in tubulin folding when localized on centrosomes, and in the assembling and disassembling of the mitotic apparatus when localized on the fibres of spindles and asters (Agueli et al., 2001).

[0547] PN30899 also interacts with homeobox protein HOS59, fragment (OsHOS59; see Example IV). Most proteins containing a homeobox domain are known to be sequence-specific DNA-binding transcription factors, some of which have important roles in development. A BLAST analysis comparing the nucleotide sequence of PN30899 against TMRI's GENECHIP® Rice Genome Array sequence database identified probeset OS000221_at (e=0 expectation value) as the closest match. Gene expression analysis indicated that this gene is not specifically expressed in several different tissue types and is not specifically induced by a broad range of plant stresses, herbicides, or applied hormones.

[0548] The bait encoding amino acids 50 to 233 of OsCYCOS2 was also found to interact with the putative Cor-A-like Mg²⁺ transporter protein, PN29970. One prey clone encoding amino acids 1 to 158 of PN29970 was retrieved from the output trait library. The constitutively expressed CorA protein is the primary magnesium cation (Mg²⁺) influx system of Bacteria and Archaea. CorA is ubiquitous in these organisms, forming a distinct family of transport proteins that comprises at least 22 members, as determined by genomic sequence analysis, and with 6 more distant members in the yeasts (Kehres et al., 1998). The similarity of PN29970 to a CorA protein suggests that this prey protein can function as an ion pump in events of the cell cycle regulated by OsCYCOS2.

[0549] The bait encoding amino acids 50 to 233 of OsCYCOS2 was also found to interact with hypothetical protein AAK18839 (PN23363) (GENBANK® Accession No. AC082645), a 286-amino acid protein in which no domains, motifs, or signatures have been clearly identified. (One prey clone encoding amino acids 50 to 148 of PN23363 was retrieved from the input trait library.) A BLAST analysis of the Genpept database indicates identity with an O. sativa unknown protein (GENBANK® Accession No. AAK18839, 3e⁻⁸¹). A BLAST analysis comparing the nucleotide sequence of PN23363 against TMRI's GENECHIP® Rice Genome Array sequence database identified probeset OS_ORF005240_at (e⁻¹⁷⁵ expectation value) as the closest match. Gene expression analysis indicated that this gene is not specifically expressed in several different tissue types and is not specifically induced by a broad range of plant stresses, herbicides, or applied hormones.

[0550] A bait fragment encoding amino acids 170 to 310 of OsCYCOS2 was found to interact with the putative CCAAT displacement protein PN26210. Three prey clones, one encoding amino acids 422 to 646 and two encoding amino acids 364 to 613, of PN26210 were retrieved from the output trait library. PN26210 is a 687-amino acid protein that includes a transmembrane domain (amino acids 621 to 367), as predicted by analysis of the amino acid sequence. The analysis also predicted three coiled coils (amino acids 60 to 345, 381 to 445, and 489 to 643), although with prediction significance below threshold. Coiled coils participate in protein interactions in many types of proteins. A leucine zipper (amino acids 321 to 342) was also identified, which is known in transcription factors to facilitate dimer formation. Moreover, BLAST analysis of the amino acid sequence indicated that PN26210 is the same as Oryza sativa protein 13702813. CCAAT displacement proteins (known as CDP, Cut, or Cux in the literature) belong to a highly conserved family of transcriptional regulators (reviewed by Nepveu, 2001). These proteins have multiple DNA-binding domains that include one Cut homeodomain and one, two or three Cut repeats. The combination of these domains determines their distinct DNA-binding activities, which are elevated during proliferation and reduced during terminal differentiation. The CCAAT motif is found in the promoters of many eukaryotic genes, and CCAAT displacement proteins typically act as transcriptional repressors by directly binding to the promoters of genes that are important during development, but they can also function as transcriptional activators. CDP/Cut was found to be a component of the promoter complex HiNF-D, which is believed to promote the transcriptional induction of histone H4 genes at the G1/S phase transition of the cell cycle and to attenuate H4 gene transcription at later cell cycle stages in humans. The regulatory effect of CDP/Cut on transcription is thought to vary depending on the proteins with which it interacts (Nepveu, supra).

[0551] The bait encoding amino acids 50 to 233 of OsCYCOS2 was also found to interact with the putative myosin heavy chain protein PN23297. (One prey clone encoding amino acids 980 to 1160 of PN23297 was retrieved from the input trait library.) PN23297 (Oryza sativa protein 15451591) is a 1601-amino acid protein that includes an ATP/GTP-binding site motif A (P-loop) (amino acids 267 to 274). Analysis of the protein sequence clearly indicates that this protein is some form of myosin chain, being similar to many myosin-like proteins and myosin heavy chain proteins including myosin-like protein (GENBANK® Accession No. NP_{—}195046, e 0.0) and myosin heavy chain (GENBANK® Accession No. T05200, e=0.0) from A. thaliana. While myosin is best known for its role in muscle contraction, this protein participates in other cellular events. In plants, for example, myosin heavy chain can participate in cytoplasmic streaming that occurs in tobacco and lily pollen tubes (Yokota et al., 1999a; Yokota et al., 1999b). Cruz et al., 1998 present evidence that myosin assembly is important for mitosis. Specifically, myosin II-deficient yeast cells undergo cell cycle arrest at the G2/M transition, a phase regulated by OsCYCOS2. Furthermore, Xia et al., 1996 demonstrate that A. thaliana myosin heavy chain is among the proteins that play a role in cell cycle regulation as well as in cytoskeleton function and in the establishment of cell polarity. The similarity of PN23297 to myosin heavy chain proteins suggests that this prey protein is a cytoskeletal component that can participate in events relating to cell polarity and cytokinesis.

[0552] Putative myosin heavy chain PN23297 also interacts with hypothetical protein 003118-3674 similar to Lycopersicon esculentum calmodulin (Os003118-3674). Os003118-3674 is a 148-amino acid protein with two EF-hand calcium-binding domains (amino acids 22 to 34 and 93 to 105). In agreement with the observation that Os003118-3674 includes EF-hand calcium-binding domains, BLAST analysis of the Genpept database indicates that this protein shares 72% identity with A. thaliana putative calmodulin (GENBANK® Accession No. NP_{—}1764705, e⁻⁵⁷), although the top score in this search is A. thaliana putative serine/threonine kinase (GENBANK® Accession No. NP_{—}172695.1, 76% identity, 7e⁻⁶⁰). Therefore, this calmodulin-like protein can possess kinase activity. A BLAST analysis comparing the nucleotide sequence of putative myosin heavy chain PN23297 against TMRI's GENECHIP® Rice Genome Array sequence database identified probeset OS005818_at (e⁻⁶ expectation value) as the closest match. The expectation value is too low for this probeset to be a reliable indicator of the gene expression of PN23297.

[0553] A bait fragment encoding amino acids 50 to 233 of OsCYCOS2 was also found to interact with the Chloroplast ATPase I subunit PN23415. One prey clone encoding amino acids 130 to 176 of PN23416 was retrieved from the input trait library. This protein shares the rice ATPase I subunit (GENBANK® Accession No. NP_{—}039379; protein 11466783). ATPases are essential cellular energy converters that transduce the chemical energy of ATP hydrolysis from transmembrane ionic electrochemical potential differences. The plant ATPases are present in chloroplasts, mitochondria and vacuoles. In the chloroplast, ATPases produce ATP that can be used as chemical energy in photosynthetic processes. The prey protein PN23416 is a chloroplast ATPase. A BLAST analysis comparing the nucleotide sequence of PN23416 against TMRI's GENECHIP® Rice Genome Array sequence database identified probeset OS003787_at (e=0 expectation value) as the closest match. Gene expression analysis that this gene is not specifically expressed in several different tissue types and is not specifically induced by a broad range of plant stresses, herbicides, or applied hormones.

[0554] A bait fragment encoding amino acids 50 to 233 of OsCYCOS2 was also found to interact with the hypothetical protein BAA85200 (i.e., PN23136), which is similar to the syntaxin related protein AtVam3p. One prey clone encoding amino acids 66 to 191 of PN23136 was retrieved from the output trait library. PN23136 is Oryza sativa protein 5922624 (BAA85200) and is similar to AtVam3p. AtVam3p, the product of the AtVAM3 gene, is a syntaxin-related molecule implicated in vacuolar assembly in A. thaliana. This protein is expressed in various tissues including roots, leaves, inflorescence stems, flower buds, and young siliques, and AtVAM3 transcripts are abundant in undifferentiated cells in the meristematic region (Sato, et al., 1997). The AtVam3p protein is one of the t-SNARE membrane proteins that mediate protein cargo trafficking inside vesicles between the organelles of the plant endomembrane system. The AtVAM3p has been localized not only to the vacuolar membrane, but also on the prevacuolar compartment in Arabidopsis cells and has been suggested to also have a role in post-Golgi trafficking (Sanderfoot et al., 1999). The similarity of PN23136 to a t-SNARE membrane protein and its association with OsCYCOS2 suggests that this prey protein can be involved in protein trafficking associated with the endomembrane system during the cell cycle.

[0555] A bait fragment encoding amino acids 170 to 310 of OsCYCOS2 was also found to interact with a fragment of the hypothetical protein PN20815, which is similar to the A. thaliana myosin heavy chain fragment. (One prey clone encoding amino acids 1 to 134 of PN20815 was retrieved from the output trait library.) PN20815 is a 496-amino acid protein. Analysis of the amino acid sequence determined that there is a possible cleavage site between amino acids 61 and 62, although no N-terminal signal peptide appears to be present. Its similarity to A. thaliana myosin heavy chain (GENBANK® Accession No. AAL11549, 4e⁻¹¹⁴) suggests that PN20815 might be a cytoskeletal component and can therefore participate in events relating to cell polarity and cytokinesis. Myosin assembly is important for mitosis. Myosin proteins have been discussed herein with regard to the interacting protein PN23297.

[0556] A bait fragment encoding amino acids 50 to 233 of OsCYCOS2 was also found to interact with novel protein PN23274. Six prey clones encoding amino acids 79 to 210 of OsPN23274, a region that includes the putative leucine zipper in PN23274, were retrieved from the input trait library. A BLAST analysis against the public databases indicated that the 680-amino acid protein OsPN23274 is similar to A. thaliana putative arm repeat containing protein (GENBANK® Accession No. NP_{—}174228, e⁻⁸⁰) and to Brassica napus putative arm repeat containing protein 1 (ARC1; GENBANK® Accession No. T08872, e⁻⁵⁶). Analysis of the OsPN23274 protein sequence predicted that it has an armadillo/plakoglobin ARM repeat profile (amino acids 346 to 386; 1.8e⁻⁰⁹). Two other ARM-repeat domains were identified with much lower prediction significance (amino acids 431 to 471, e=1.2; and amino acids 507 to 548, e=35). ARM motifs are tandemly repeated sequences of approximately 50 amino acid residues that occur in a wide variety of eukaryotic proteins (Peifer et al., 1994; Groves 1999; Hatzfeld, 1999; Huber et al., 1997). The ARM repeat was first identified in the Drosophila protein armadillo that is involved in segment polarity and cell adhesion (Peifer et al., 1990). ARM repeats are found in the mammalian Wnt pathway proteins beta-catenin (an armadillo homolog), plakoglobin, Adenomatous Polyposis Coli (APC) tumor suppressor protein (Huber et al., supra), and other proteins. The ARM repeats in Armadillo family members mediate various protein interactions representing steps in signaling events that result in control of cell adhesion, cytoskeletal alterations, and transcription (reviewed by Hatzfeld, 1999). Furthermore, analysis of the protein sequence identified a SecD SecF domain (Bolhuis et al., 1998) between amino acids 316 and 531, although with poor prediction significance (e=9). This domain is necessary for secretion of some proteins. Also predicted is a leucine zipper (amino acids 65 to 86), a domain known to facilitate protein interactions, particularly in transcription factors. The predicted leucine zipper is of interest when considering that beta-catenin is known to participate in transcriptional regulation. Given its similarity to an ARM repeat protein and its interaction with OsCYCOS2, the prey protein OsPN23274 has a likely role in cell adhesion associated with cytoskeletal alterations occurring at the G2/M transition.

[0557] A BLAST analysis comparing the nucleotide sequence of OsPN23274 against TMRI's GENECHIP® Rice Genome Array sequence database identified probeset OS017669_at (4e⁻⁷⁰ expectation value) as the closest match. Gene expression analysis that this gene is not specifically expressed in several different tissue types and is not specifically induced by a broad range of plant stresses, herbicides, or applied hormones.

[0558] A bait fragment encoding amino acids 50 to 233 of OsCYCOS2 was also found to interact with a fragment of the novel protein PN23390, a putative kinesin-like calmodulin-binding protein (OsPN23390). Two prey clones, encoding amino acids 595 to 845 and 576 to 738, of OsPN23390 were retrieved from the output trait library. Kinesins are molecular motors, molecules that hydrolyze ATP and use the derived energy to generate motor force. Molecular motors are involved in diverse cellular functions such as vesicle and organelle transport, cytoskeleton dynamics, morphogenesis, polarized growth, cell movements, spindle formation, chromosome movement, nuclear fusion, and signal transduction. Three families of non-plant molecular motors (kinesins, dyneins, and myosins) have been characterized. Kinesins and dyneins use microtubules, while myosins use actin filaments as tracks to transport materials intracellularly. A large number (about 40) of kinesin and myosin motors have been identified in A. thaliana, although little is known about plant molecular motors and their roles in cell division, cell expansion, cytoplasmic streaming, cell-to-cell communication, membrane trafficking, and morphogenesis. Calcium, through the calcium binding protein calmodulin, is thought to play a key role in regulating the function of both microtubule- and actin-based motors in plants (molecular motors are reviewed in Reddy, 2001). The kinesin-like calmodulin (CaM) binding protein (KCBP), a minus end-directed microtubule motor protein unique to plants, has been implicated in cell division. During nuclear envelope breakdown and anaphase, activated KCBP promotes the formation of a converging bipolar spindle by sliding and bundling microtubules, while KCBP activity is down-regulated by Ca²⁺ and CaM during metaphase and telophase (Vos et al., 2000). The association of OsPN23390 with OsCYCOS2 suggests that the prey protein is involved in microtubule movement during cell division events mediated by the cyclin. The presence of a calmodulin-binding domain indicates that its activity is regulated by calmodulin.

[0559] OsCYCOS2 was also found to interact with the novel protein PN23484. The bait fragment used in the search encodes amino acids 170 to 310 of OsCYCOS2. Four prey clones, one encoding amino acids 77 to 233, two encoding amino acids 64 to 212, and one encoding amino acids 90 to 245, of OsPN23484 were retrieved from the output trait library. As already discussed above, OsPN23484 also interacts with the bait OsS49462. This observation validates the OsCYCOS2-OsPN23484 interaction and suggests that OsPN29942 plays a broad role in regulation by cyclins and thus in the control of cell cycle progression.

[0560] The bait fragment encoding amino acids 50 to 233 of OsCYCOS2 was also found to interact with novel protein OsPN26688. One prey clone encoding amino acids 132 to 255 of OsPN26688 was retrieved from the input trait library. OsPN26688 is a novel 251-amino acid protein of unknown function. The lack of information about OsPN26688 makes it difficult to determine its function and the significance of the OsCYCOS2-OsPN26688 interaction. However, the discovery of this interaction links OsPN26688 to control of the cell cycle in rice.

[0561] A BLAST analysis comparing the nucleotide sequence of OsPN26688 against TMRI's GENECHIP® Rice Genome Array sequence database identified probeset OS005073.1_at (e=0 expectation value) as the closest match. Gene expression analysis indica ted that this gene is not specifically expressed in several different tissue types and is not specifically induced by a broad range of plant stresses, herbicides, and applied hormones.

[0562] OsCYCOS2 was also found to interact with novel protein PN29882. This protein is similar to myosin proteins. The bait fragment used in the search encodes amino acids 50 to 233 of OsCYCOS2. One prey clone encoding amino acids 107 to 273 of OsPN29882 was retrieved from the output trait library.

[0563] OsPN29882 also interacts with MADS box-like protein BAA8188 (OsBAA81881; see Example III). MADS box transcription factors, encoded by members of the large MADS-box family of genes, participate in signal transduction and developmental control in plants, animals, yeast, and fungi. In plants, they are important regulators of genes implicated in flower and fruit development. This links cell cycling controlled by OsCYCOS2 to development controlled by MADS box proteins.

[0564] OsPN29882 also was found to interact with a ser/thr kinase/calmodulin that also interacted with PN23297 (see description above). The ser/thr kinase/calmodulin can serve as part of the CDK complex with OsCYCOS2 to activate myosin substrates during mitosis.

[0565] A bait fragment encoding amino acids 170 to 310 of OsCYCOS2 (a region that includes the cyclin domain) was found to interact with a fragment of the novel protein PN29942 This protein is discussed earlier in this Example as an interactor for the bait OsS49462. One prey clone encoding amino acids 1 to 159 of OsPN29942 was retrieved from the output trait library. This region spans the putative BTB/POZ domain that was identified in OsPN29942.

[0566] A bait fragment encoding amino acids 50-233 of OsCYCOS2 was found to interact with a fragment of the novel protein OsPN29956. OsPN29956 is a novel protein for which only a partial sequence is known. Analysis of the available 374 amino acids indicated that OsPN29956 includes a spectrin repeat (amino acids 167 to 209). In agreement with the observations that OsPN29956 is a nuclear protein with a spectrin repeat, a BLAST analysis revealed that OsPN29956 shares amino acid sequence with nuclear matrix constituent protein 1 from A. thaliana (35% identity, GENBANK® Accession No. BAB10684, 4e⁻⁵⁵). Therefore, there is strong evidence that OsPN29956 is a nuclear matrix protein, and the interaction between OsCYCOS2 and OsPN29956 can represent a step in cell cycle control through modulation of nuclear events.

[0567] Three prey clones were retrieved from the output trait library. Two of these encode amino acids 96 to 235 and one encodes amino acids 2 to 373 of OsPN29956. All three prey clones include the spectrin repeat that is present in OsPN29956. Spectrin repeats are also found in several proteins involved in cytoskeletal structure, such as actin-binding proteins (Hartwig, 1995). Actin-binding proteins of the superfamily of spectrins are ubiquitous proteins present in all animal and in plant cells. Spectrin-like epitopes have been localized mainly at the plasma membrane in several plant species and different cell types, but also in secretory vesicles, in the nuclei of various plant tissues, and in gravitropically tip-growing rhizoids and protonemata of characean algae, where they were found to be associated with the actin-organized aggregate of endoplasmic reticulum and correlated with active tip growth (Braun, 2001). Studies indicate the presence of spectrin-based membrane skeleton in higher plant cells and demonstrate the ability of these proteins to interact with other components of the membrane skeleton such as actin and calmodulin (Bisikirska et al., 1997). Therefore, OsPN29956 could be a spectrin-like cytoskeleton protein that binds actin or calmodulin during events related to cell division.

[0568] A bait fragment encoding amino acids 50-233 of OsCYCOS2 was also found to interact with a fragment of protein PN29958. One prey clone encoding amino acids 3 to 304 of OsPN29958 was retrieved from the output trait library. BLAST analysis suggests that this is a centromere homologue (e-10) and is also homologous to the tobacco NT3 salinity tolerance protein (e-12). The BLAST results suggest a role for PN29958 in the centromere and also in salinity tolerance.

[0569] A bait fragment encoding amino acids 50-233 of OsCYCOS2 was also found to interact with protein PN29961, which is similar to A. thaliana protein BAB02349. One prey clone encoding amino acids 10 to 215 of OsPN29961 was retrieved from the output trait library.

[0570] A bait fragment encoding amino acids 50-233 of OsCYCOS2 was also found to interact with protein OsPN29965. One prey clone encoding amino acids 12 to 124 of OsPN29965 was retrieved from the output trait library. OsPN29965 is similar to A. thaliana kinesin (centromere protein). In animal cells, cytokinesis begins shortly after the sister chromatids move to the spindle poles. The centromere is a region of the chromosome to which the spindle fibers attach for the separation of the replicated chromatids in mitosis and meiosis. The kinetochores are the main sites of interaction between spindle microtubules and chromosomes; they are protein-rich structures associated with centromeric DNA and form on each sister chromatid at opposite sides of the paired centromeric region. Various proteins have been localized to animal kinetochores, including dynein and kinesin, but the protein composition of plant kinetocores has yet to be elucidated (Buchanan et al., 2002). The kinetochore-associated kinesin-like protein CENP-E binds to kinetochores during mitosis and has been shown to be essential for chromosome bioriented spindle attachment in mammalian cells (McEwen et al., 2001). Like CENP-E, the Drosophila kinesin-like motor protein CENP-meta similar to the vertebrate CENP-E, is a component of centromeric/kinetochore regions of Drosophila chromosomes and is required for maintenance of metaphase chromosome alignment (Yucel, 2000). The inner centromere protein (INCENP) of animal cells has been implicated in both chromosome segregation and cytokinesis by promoting dissolution of sister chromatid cohesion and the assembly of the central spindle (Kaitna et al., 2000). Kinesin-like calmodulin-binding proteins (KCBP) that are regulated by Ca²⁺/calmodulin have been isolated from dicot (A. thaliana) as well as from monocot plants (maize). These motor proteins contain a highly conserved C-terminal region that includes the motor domain and the calmodulin-binding domain, which suggests that the KCBP is ubiquitous and highly conserved in all flowering plants (Abdel-Ghany et al., 2000). Plant KCBP localizes to and is involved in establishing mitotic microtubule (MT) arrays during different stages of cell division, and Ca²⁺/calmodulin regulates the formation of these MT arrays (Kao et al., 2000).

[0571] The association of OsPN29965 with OsCYCOS2 suggests that the prey protein is involved in microtubule movement during cell division events mediated by the cyclin. OsPN29965 likely represents a novel centromere-kinetochore-associated protein in plants.

[0572] A bait fragment encoding amino acids 50-233 of OsCYCOS2 was also found to interact with a fragment of the novel protein OsPN29966. (One prey clone encoding amino acids 8 to 216 of OsPN29966 was retrieved from the output trait library.) PN29966 is similar to other myosin proteins also described earlier in this Example. It also interacted with the ser/thr kinase calmodulin (see above).

[0573] A bait fragment encoding amino acids 50-233 of OsCYCOS2 was also found to interact with a fragment of the protein PN29967. Three prey fragments encoding amino acids 16 to 174 of OsPN29967 were retrieved from the output trait library. OsPN29967 is a novel protein for which only a partial sequence is known. Analysis of the available 176 amino acids predicted a cleavable signal peptide (amino acids 1 to 37) and a leucine zipper (amino acids 123 to 144). The leucine zipper domain supports the notion that this protein participates in protein-protein interactions. A BLAST analysis against the Genpept database determined that OsPN29967 shares 40% amino acid sequence identity with an A. thaliana unknown protein (GENBANK® Accession No. CAB10357, 2e⁻¹⁴), for which no information is available other than the nucleotide sequence of the gene encoding this protein.

[0574] A bait fragment encoding amino acids 50-233 of OsCYCOS2 was also found to interact with the novel protein OsPN29968, which is sijmilar to the unknown A. thaliana protein BAB01990. One prey clone encoding amino acids 12 to 113 of OsPN29968 was retrieved from the output trait library. A BLAST analysis comparing the nucleotide sequence of OsPN29968 against TMRI's GENECHIP® Rice Genome Array sequence database identified probeset OS006631.1_at (e⁻⁹⁵ expectation value) as the closest match. Gene expression analysis indicated that this gene is specifically expressed in seed.

[0575] A bait fragment encoding amino acids 50-233 of OsCYCOS2 was also found to interact with a fragment of the novel protein PN29969, which is similar to the A. thaliana unknown protein BAB01990. Two prey clones encoding amino acids 16 to 123 of OsPN29969 were retrieved from the output trait library. OsPN29969 is a novel protein for which the complete amino acid sequence is not known. Analysis of the available 123 amino acids identified a tropomyosin signature (amino acids 75 to 91), which suggests that OsPN29969 might be a novel structural protein. Tropomyosins are a family of closely related proteins present in muscle and non-muscle cells. In striated muscle, tropomyosin mediates the interactions between the troponin complex and actin so as to regulate muscle contraction, while the role of this protein in smooth muscle and non-muscle tissues is not clear (Smilie, 1979; McLeod, 1986). Based on the interaction of OsPN29969 with OsCYCOS2, this protein is likely to be involved in mediating interactions between actin and other proteins during the G2/M transition. Thus, the interaction between OsCYCOS2 and OsPN29969 can represent a step in the control of the cell cycle through modulation of the nuclear matrix.

[0576] A bait fragment encoding amino acids, 50-233 of OsCYCOS2 was also found to interact with the putative Cor-A-like Mg²⁺ transporter protein PN25381. One prey clone encoding amino acids 30 to 218 of OsPN25381 was retrieved from the output trait library. This protein is Oryza sativa protein 13357265. The constitutively expressed CorA protein is the primary magnesium cation (Mg²⁺) influx system of Bacteria and Archaea. CorA is ubiquitous in these organisms, forming a distinct family of transport proteins that comprises at least 22 members, as determined by genomic sequence analysis, and with 6 more distant members in the yeasts (Kehres et al., 1998). The similarity of PN25381 to a CorA protein suggests that this prey protein can function as an ion pump in events of the cell cycle regulated by OsCYCOS2.

[0577] A bait fragment encoding amino acids 170 to 310 of OsCYCOS2 was found to interact with novel protein PN30854. One prey clone encoding amino acids 100 to 169 of OsPN30854 was retrieved from the output trait library. OsPN30854 is a 169-amino acid protein. A BLAST analysis against the Genpept database indicated that OsPN30854 shares 67% identity with A. thaliana protein AT5g03660/F17C15_{—}80 (GENBANK® Accession No. AAL06894, 9e⁻⁴²). The interaction of PN30854 with OsCYCOS2 suggests that it plays some role in cell cycle regulation. A BLAST analysis comparing the nucleotide sequence of OsPN30854 against TMRI's GENECHIP® Rice Genome Array sequence database identified probeset OS009560_r_at (2e⁻¹⁶ expectation value) as the closest match. The expectation value is too low for this probeset to be a reliable indicator of the gene expression of OsPN30854.

[0578] A bait fragment encoding amino acids 50 to 233 of OsCYCOS2 was found to interact with a fragment of novel protein PN30899, which is similar to A. thaliana protein NP_{—}199769. This protein is similar to DNAJ, a type of chaperone. Heat shock protein chaperones and potential roles in cell cycling have been discussed herein. One prey clone encoding amino acids 4 to 228 of OsPN30899 was retrieved from the output trait library.

Summary

[0579] M cyclins complexed with protein kinases commit the cell to mitosis at the G2-to-M transition. The synthesis of M cyclins in late G2 prepares the cell for mitosis, and increase of mitotic CDK activity at the G2-to-M transition initiates mitosis and cytokinesis. Mitosis, the stage in the cell cycle at which the duplicated chromosomes are separated into two nuclei, and cytokinesis, the division of one cell into two cells, are accomplished by means of cytoskeletal structures. Mitosis depends on the mitotic spindle, a bipolar arrangement of mostly microtubules, but also actin and associated proteins, that interact with chromosomes and other proteins that participate in chromosome movement. Cytokinesis depends on the phragmoplast, an organelle consisting of actin, myosin, and microtubules which gives rise to a plate in the center of the plant cell between the reforming nuclei and shapes the growing plate into a partition in the form of a new cell wall. Actin filaments, microtubules, and intermediate filaments are filamentous protein polymers comprising the cytoskeleton of eukaryotic cells. Accessory proteins are the motors and joints that link, move and modify the actin and tubulin scaffolding to stabilize the cytoskeleton, create polarities and move chromosomes during cell division, lower polymer concentration by binding (i.e., proteins that bind soluble actin), and link the cytoskeleton to other cellular components such as biosynthetic or signaling enzymes. Many different accessory proteins mediate the function of the cytoskeleton by interacting with the polymers, including the motor proteins myosin, dynein and kinesin, as well as other proteins that cross-link (or bundle) cytoskeletal polymers of the same type. The dynamic behavior and polarity of actin and microtubules, enhanced by energy derived from hydrolysis of nucleoside triphosphates, is responsible for the movements of cytoplasm and organelles during the different phases of the cell cycle.

[0580] Mitosis starts with the initiation of chromosome condensation and the disassembly of the nuclear envelope that separates nuclear matrix from cytoplasm. Cells become fully competent for mitosis when the condensed chromosomes are aligned along a plane in the center of the cell, each chromosome comprising two chromatids (daughter strands) attached to each other and connected by microtubules to opposite ends of the cell. Chromosome segregation then initiates with the severing of the link between sister chromatids. The centromere is a region of the chromosome to which the spindle fibers attach for the separation of the replicated chromatids. The kinetochores, the main sites of interaction between spindle microtubules and chromosomes, are protein-rich structures that attach to centromeric DNA and serve as attachment points for the spindle microtubules, which congregate the chromosomes along a plate and subsequently pull apart the sister chromatids to opposite cell poles. Various proteins have been localized to animal kinetocores, including dynein and kinesin, but the protein composition of plant kinetocores has yet to be elucidated. (The plant cell cycle and cytoskeleton structure are discussed in detail in Buchanan et al., 2002). The concentrations of cyclins in the plant cell are thought to be important in mediating CDK activity at the cytoskeleton, chromosomes, spindle, nuclear envelope, and phragmoplast (John et al., 2001).

[0581] The interactions identified in this Example for OsCYCOS2 with several cytoskeletal structural proteins in consistent with the role of the cyclin in controlling events related to cell division. Five of these prey proteins—PN23484, PN23297, PN20815, OsPN29882, and OsPN29966—are putative myosin heavy-chain proteins. Previous reports on the role of Arabidopsis myosin heavy chain protein in cell cycle control and cytoskeleton function Xia et al., 1996; Cruz et al., 1998) suggest that the putative myosin prey proteins identified here likely function as actin motors during the establishment of cell polarity at mitosis or during cytokinesis. The observation by Cruz et al. that myosin is required in yeast cells for the G2/M transition supports the notion that the interactions of OsCYCOS2 with the myosin heavy chain proteins regulate the cell cycle at this transition point. It is interesting that PN23297, PN29882 and PN29966 also interact with a ser/thr kinase/calmodulin-like protein (Os003118-3674). Kinases regulate the activity of CDK-cyclin complexes, and while no evidence exists that all three proteins—OsCYCOS2, putative myosin heavy chain PN23297 (or other myosins), and the kinase Os003118-3674—interact at the same time, the possibility that Os003118-3674 possesses kinase activity increases the likelihood that this interaction propagates a signaling event.

[0582] Other cytoskeletal proteins interacting with OsCYCOS2 include a spectrin-like protein with a presumed actin-binding function nuclear matrix constituent, and its interaction with OsCYCOS2 can represent a step in cell cycle control through modulation of nuclear events (OsPN29956).

[0583] Additional interactors with a motor function are the kinesin-like proteins OsPN23390 and OsPN29965. Kinesins in both animals and plants are implicated in the formation of mitotic spindles (Buchanan et al., 2002; Vos et al., 2000). Plant kinesin-like proteins regulated by calmodulin are involved in microtubule array formation during cell division (Kao et al., 2000). Based on these reports and on their interactions with OsCYCOS2, we postulate that the prey proteins OsPN23390 and OsPN29965 function as microtubule motor proteins during the formation of the mitotic spindle. The calmodulin-regulated OsPN23390 can be involved in microtubule array formation, while the similarity of OsPN29965 to a centromere protein suggests that this prey protein is a novel kinesin component of the centromeric/kinetochore regions of rice chromosomes with a putative role in chromosome alignment. The interactions of the cyclin protein with all these cytoskeletal proteins represent a newly characterized mechanism for control of cell division in rice.

[0584] OsCYCOS2 also interacts with PN23416, a protein similar to chloroplast ATPase I subunit. The interactions of the cyclin with microtubule- and actin-motor proteins is consistent with the presence of the ATPase prey protein. ATPases hydrolyze ATP to provide energy used by the motor proteins to generate force and directional movement associated with microtubules and actin filaments during mitosis.

[0585] Another prey protein, OsPN23274, is similar to A. thaliana ARM repeat-containing protein. The interactions of the ARM repeat domain with diverse binding partners reflect diverse functions for ARM repeat-containing proteins. These molecules combine structural roles as adhesion (cell-contact) and cytoskeleton-associated proteins with signaling roles by generating and transducing signals affecting gene expression (Hatzfeld, 1999). The interaction of OsPN23274 with the cyclin suggests that the prey protein is likely involved in cell adhesion associated with the cytoskeletal alterations occurring during the transition from the G2 to M phase, although a role in signaling can be coupled with this function.

[0586] Another interactor for OsCYCOS2 is PN26210, a putative CCAAT displacement protein with a role as a transcriptional regulator. During replication, chromosomal DNA remains organized in chromatin, a complex composed mainly of histone proteins. Histone gene expression (RNA) and protein accumulation are strongly stimulated in early S phase to double histone cellular content for the assembly of newly replicated DNA. CCAAT displacement proteins (CDPs) are thought to function as transcriptional activators of histone gene expression at the G1/S phase transition and as attenuators of histone gene transcription at later cell cycle stages in humans (Nepveu, 2001). The dependence of the DNA-binding activity of these proteins on the cell cycle validates the interaction of a putative CCAAT displacement protein with a cyclin. Perhaps this interaction participates in a mechanism in which OsCYCOS2 sequesters PN26210 and prevents it from participating in gene regulation. It is also worth noting that the function of CDPs is regulated by posttranslational modifications (Nepveu, A., supra), specifically, the DNA-binding activity, and consequently, the transcriptional activity of CDP is inhibited by phosphorylation of either cut repeats or the cut homeodomain. Given that cyclin s interact with cyclin-dependent kinases, it is tempting to speculate that the function of the OsCYCOS2-PN26210 interaction is, alternatively, to allow the posttranslational phosphorylation of PN26210 as part of the process leading to down-regulation of histone transcription during the G2/M phase.

[0587] Three membrane transport proteins were also found to interact with OsCYCOS2. PN23136 is similar to a t-SNARE membrane protein, a family of proteins involved in protein cargo trafficking among the organelles of the plant endomembrane system (Sanderfoot et al., 1999). The ER system, which gives rise to the endomembrane system, is a dynamic network whose organization changes during the cell cycle. During mitosis, the ER undergoes a series of rearrangements that result in regulation of spindle activities and cell plate assembly through control of local calcium concentrations (Buchanan et al., 2002). The interaction of PN23136 with OsCYCOS2 points to a role for the prey protein in mediating protein trafficking associated with the dynamic behavior of the ER endomembrane system during mitosis. The other two transporters found to interact with OsCYCOS2 are putative CorA-like magnesium cation transporter that can function as a membrane-spanning pump to regulate turgor pressure or transmit solutes during cytokinesis.

[0588] Finally, OsCYCOS2 interacts with the putative heat shock prey proteins PN23169 and PN30899. HSPs act as molecular chaperones and, while these proteins in plants have been mainly linked to the stress response, some are not related to stress and their functions remain to be defined (Buchanan et al., 2002). In the context of all the interactions identified for OsCYCOS2, we speculate that PN30899 and PN23169 act as a molecular glue to hold together interacting proteins. An alternative role for this prey protein can be deduced by functional homology with animal heat shock proteins whose chaperone roles in tubulin folding or mitotic structures assembly/disassembly depends on their localization on centrosomes or spindle fibers, respectively (Agueli et al., 2001). These are functions associated with the phase of the cell cycle controlled by OsCYCOS2.

[0589] Proteins that participate in cell cycle regulation can be targets for genetic manipulation or for compounds that modify their level or activity, thereby modulating the plant cell cycle. The identification of genes encoding these proteins in rice can allow the development of methods for controlling plant growth, specifically, cell proliferation and differentiation, to facilitate or retard plant development and promote regeneration. Such methods can involve the application of compounds to crops or the engineering of plants in which the level and/or activity of a protein associated with cell cycle regulation is modulated for a time and under conditions sufficient to modify or control cell division.

[0590] One application for the results of this Example would involve modifying plant growth in the presence of one or more environmental conditions including increased or decreased temperatures, salinity, drought or nutrients, or exposure to disease. For example, in case that a limited amount of water is available following winter rain, it can be necessary to restrain plant growth so that water resources are not exhausted before the valuable portion of the crop has developed. Chemical agents that reduce water transpiration have been found to have persisting adverse side effects on subsequent growth. By contrast, modulation of the expression or activity of proteins regulating the cell cycle could result in reduced growth without toxic side effects. Methods have been proposed for controlling plant cell growth by modulating the level and or catalytic activity of proteins having a cyclin-related kinase function to facilitate plant regeneration and development in cereal crops (see U.S. Pat. No. 6,087,175).

### Example III

[0591] This Example provides a network of proteins interacting with rice MADS box protein MADS45 (OsMADS45), AP1-like MADS box protein (OsRAP1B), MADS box protein MADS6 (OsMADS6), MADS-box protein FDRMADS8 (OsFDRMADS8), MADS box protein MADS3 (OsMADS3), MADS box protein MADS5 (OsMADS5), and MADS box protein MADS15 (OsMADS15). Almost all the proteins of the network, identified by means of yeast two-hybrid assays, are MADS box transcription factors.

[0592] MADS box transcription factors, encoded by members of the large MADS-box family of genes, include a conserved sequence-specific DNA-binding/dimerization domain designated as the MADS box. These proteins participate in signal transduction and developmental control in plants, animals, yeast, and fungi. In angiosperms, many MADS box proteins display primarily floral-specific expression and are important regulators of genes implicated in flower and fruit development, most notably in the determination of meristem and floral organ identity. Floral development is conserved among divergent species of flowering plants such as Arabidopsis thaliana and maize, which indicates that MADS box genes are part of a highly conserved process that has evolved from an ancient flowering plant (the evolution and function of these genes is reviewed in Ng & Yanofsky, 2001; Theissen et al., 2000; and specifically in rice and maize, in Munster et al., 2001). Plant MADS box genes are organized into several phylogenetically distinct gene groups—AGAMOUS (AG), APETALA3 (AP3)/PISTILLATA (PI) and APETALA1 (AP1)/AG-LIKE (AGL)9—each group containing genes that share similar functions in regulating different aspects of flower development, including early acting meristem identity genes controlling the transition from vegetative to reproductive development and floral meristem development, late acting floral organ identity genes, and genes mediating between these two functions (reviews by Purugganan et al., 1995; Theissen et al., 2000). MADS box genes interact with each other and with other genes participating in the genetic control of flower development, with regulatory interactions (activation, repression) between the different genes/groups of genes within this network. In addition to flower development, several MADS box genes are involved in the control of ovule and seed development, vegetative growth, root development, fruit development and dehiscence, embryogenesis, or symbiotic induction (Moon et al., 1999; Riechmann & Meyerowitz, 1997; Theissen et al., 2000). Investigation of MADS box transcription factors and the proteins with which they interact in specific pathways can thus elucidate these biological processes at the molecular level.

[0593] The biological relevance of such interactions is further underlined by the fact that these proteins are known to regulate transcription as heterodimers or ternary complexes that include other MADS box proteins (Lim et al., 2000). These interactions have been reported to occur through the K box (Sung et al., 2001; Lim et al., 2000) and to be enhanced by a region immediately downstream of the K domain. Plant MADS box proteins consist of a MADS box domain, an I region, a K domain, and a C-terminal region. The K box is a domain characteristic of plant MADS box proteins that sets them apart from their animal and fungal counterparts, which indicates that plant MADS box factors can have different criteria for interaction (Davies et al., 1996). The K box is commonly found C-terminal to MADS box domains and is thought to serve as a dimerization moiety by forming coiled-coil structures known to facilitate protein interactions. The high potential for protein-protein interactions makes MADS box proteins suitable candidates for two-hybrid assays. However, though many MADS box proteins have been isolated from monocots including maize, sorghum, orchid and rice, few interactions between the MADS box proteins have been investigated (Moon et al., 1999). The protein interactions identified in this Example are aimed at elucidating the molecular mechanisms of plant development regulation by MADS box proteins in rice. The identification and characterization of protein interactions involving MADS box transcription factors in a major crop such as rice has important applications in agriculture. Knowledge of the complex genetic system controlling flower morphogenesis in cereals could be exploited for the development of genetically engineered plants characterized as having a phenotype of modulated development, for example, early or delayed flowering.

[0594] A yeast two-hybrid search (as has been described above) led to the identification of a network of rice proteins comprised mainly of MADS box transcription factors that interact as heterodimers, some of which represent interactions not previously described. Some of the interactors are previously identified proteins including the MADS box proteins Os008339, OsFDRMADS6, OsMADS7, OsMADS8, OsMADS13, OsMADS14, OsMADS17, OsMADS18, OsBAA81880, and the same proteins used as baits in these interaction studies, OsMADS45, OsRAP1B, OsMADS6, OsFDRMADS8, OsMADS1, OsMADS3, OsMADS5, and OsMADS15. An additional interactor is the seed storage protein prolamin (OsRP5). The search also led to the identification of six novel rice proteins: the MADS box protein OsPN29949 (interactor for OsMADS6); a putative transcriptional regulator, OsPN23495 (interactor for OsMADS45); a putative hox protein, OsPN22834 (interactor for OsRAP1B); a protein of unknown function, OsPN31165 (interactor for OsMADS3); a 14-3-3-like protein, Os000564-1102 (interactor for OsMADS5); and a putative centromere protein, OsPN29971 (interactor for OsMADS15).

[0595] To determine the relationships among the interacting MADS box proteins, an analysis of the amino acid sequence alignment of the regions encoded by the interacting clones was performed. From these alignments, a phylogenetic tree was constructed.

[0596] The interacting proteins of the Example are listed in Tables 8-14, followed by detailed information on each protein and a discussion of the significance of the interactions. A diagram of the interactions is shown in FIG. 2. The nucleotide and amino acid sequences of the proteins of this Example are provided in SEQ ID NOs: 55-66, 199-202, and 223-256. An analysis of the amino acid sequence alignments is shown in FIGS. 3A-3D, and phylogenetic tree is shown in FIG. 3E.

[0597] The ability of the interacting proteins to interact with the bait proteins OsMADS45, OsRAP1B, OsMADS6, OsFDRMADS8, OsMADS1, OsMADS3, OsMADS5, and OsMADS15, and the known or predicted biological functions of the interacting proteins indicate that the interacting proteins are involved in transcriptional regulation of genes associated with flower development in rice, except for prolamin, with a presumed role in seed development. Some of the interactions and proteins identified in this Example have not been previously described and represent a novel observation.

### Tables 8-14

### Interacting Proteins Identified in the Yeast Two-Hybrid Screen for the Bait Proteins OsMADS45, OsRAP1B, OsMADS6, OsFDRMADS8, OsMADS3, OsMADS5, and OsMADS15

[0598] The names of the clones of the proteins used as baits and found as preys are given. Nucleotide/protein sequence accession numbers for the proteins of the Example (or related proteins) are shown in parentheses under the protein name. The bait and prey coordinates (Coord) are the amino acids encoded by the bait fragment(s) used in the search and by the interacting prey clone(s), respectively. The source is the library from which each prey clone was retrieved.

TABLE 8
Interacting Proteins Identified for OsMADS45 (MADS box protein MADS45)

| | | | |
|---|---|---|---|
| | Protein Name | Bait | Prey Coord |
| Gene Name | (GENBANK ® Accession No.) | Coord | (Source) |

BAIT PROTEIN

| | | |
|---|---|---|
| OsMADS45 | O. sativa MADS box protein MADS45 | 1-250* |
| PN20231 (1905929- | (U31994, AAB50180) | 100-250* |
| OS000555) | | 150-250* |
| (SEQ ID NO: 202) | | |

INTERACTORS

| | | | |
|---|---|---|---|
| Os008339 | O. sativa OS008339 MADS box | 50-198 | 30-178 |
| PN20847(AJ293816- | transcription factor, fragment | | (input trait) |
| OS0083339) | (AJ293816) | | |
| (SEQ ID NO: 224) | | | |
| OsFDRMADS6 | O. sativa MADS-box protein FDRMADS6 | 50-198 | 3 × 115-246 |
| PN19766 | (AF139664, AAF66997) | | 93-244 |
| (SEQ ID NO: 226) | | | (output trait) |
| OsFDRMADS8 | O. sativa MADS-box protein FDRMADS8 | 50-198 | 2 × 104-233 |
| PN20698 | (AF141965, AAD38369) | | 63-186 |
| (SEQ ID NO: 228) | | | (output trait) |
| OsMADS1 | O. sativa MADS box protein MADS1 | 50-198 | 3 × 82-241 |
| PN19788 | (AF204063, AAG35652) | | 2 × 71-257 |
| (11493806- | | | (output trait) |
| OS015136) | | | |
| (SEQ ID NO: 230) | | | |
| OsMADS3 | O. sativa MADS box protein MADS3 | 50-198 | 48-177 |
| PN20700 | (L37528, AAA99964) | | (output trait) |
| (SEQ ID NO: 232) | | | |
| OsMADS5 | O. sativa MADS box protein MADS5 | 50-198 | 113-225 |
| PN20770 | (U78890, AAB71434) | | (output trait) |
| (SEQ ID NO: 234) | | | |
| OsMADS6 | O. sativa MADS box protein MADS6 | 50-198 | 70-250 |
| PN20233 | (U78782, AAB64250) | | (output trait) |
| (SEQ ID NO: 236) | | | |
| OsMADS13 | O. sativa MADS box protein MADS13 | 50-198 | 2 × 75-263 |
| PN20668 | (AF151693, AAF13594) | | (output trait) |
| (SEQ ID NO: 238) | | | |
| OsMADS14 | O. sativa MADS box protein MADS14 | 50-198 | 124-223 |
| PN20910 | (AF058697, AAF19047) | | 82-197 |
| (SEQ ID NO: 200) | | | (output trait) |
| OsMADS15 | O. sativa MADS box protein MADS15 | 50-198 | 2 × 92-237 |
| PN20842 | (AF058698, AAF19048) | | (output trait) |
| (SEQ ID NO: 240) | | | |
| OsMADS18 | O. sativa MADS box protein MADS18 | 50-198 | 57-224 |
| PN20912 | (AF091458, AAF04972) | | 82-154 |
| (SEQ ID NO: 242) | | | (output trait) |
| OsPN23495 | Novel protein PN23495 | 50-198 | 39-165 |
| (SEQ ID NO: 56) | | | 12-198 |
| | | | (input trait) |
| OsRAP1B | O. sativa AP1-like MADS box protein | 50-198 | 1-158 |
| PN20232 (7592641- | RAP1B | | (output trait) |
| OS000556) | (AB041020, BAA94342) | | |
| (SEQ ID NO: 244) | | | |

*Self-activating clone, i.e., it activates the reporter genes in the two-hybrid system in the absence of a prey protein, and thus it was not used in the search.

[0599] TABLE 9
Interacting Proteins Identified for OsRAP1B
(O. sativa AP1-like MADS box protein RAP1B)

| | | | |
|---|---|---|---|
| | Protein Name | Bait | Prey Coord |
| Gene Name | (GENBANK ® Accession No.) | Coord | (Source) |

BAIT PROTEIN

| | |
|---|---|
| OsRAP1B | O. sativa AP1-like MADS box protein |
| PN20232 | RAP1B(AB041020, BAA94342) |
| (SEQ ID NO: 244) | |

INTERACTORS

| | | | |
|---|---|---|---|
| Os008339 | O. sativa OS008339 MADS box | 1-150 | 3 × 32-162 |
| PN20847 | transcription factor, fragment | | (input trait) |
| (SEQ ID NO: 224) | (AJ293816) | | |
| OsBAA81880 | O. sativa MADS box-like protein | 125-235 | 2-168 |
| PN20837 (52957- | (AB003322, BAA81880) | | 24-203 |
| OS011794) | | | (output trait) |
| (SEQ ID NO: 246) | | | |
| OsFDRMADS6 | O. sativa MADS-box protein FDRMADS6 | 1-247 | 1-186 |
| PN19766 | (AF139664, AAF66997) | | (output trait) |
| (SEQ ID NO: 226) | | 100-247 | 100-246 |
| | | | (output trait) |
| OsFDRMADS8 | O. sativa MADS-box protein FDRMADS8 | 100-247 | 4 × 69-233 |
| PN20698 | (AF141965, AAD38369) | | (input trait) |
| (SEQ ID NO: 228) | | | 94-230 |
| | | | (output trait) |
| | | 1-247 | 53-233 |
| | | | (output trait) |
| OsMADS1 | O. sativa MADS box protein MADS1 | 1-247 | 4 × 100-231 |
| PN19788 | (AF204063, AAG35652) | | (input trait) |
| (SEQ ID NO: 230) | | | 95-257 |
| | | | (output trait) |
| | | 100-247 | 2 × 95-257 |
| | | | (input trait) |
| | | 65-200 | 4 × 74-172 |
| | | | (input trait) |
| | | 125-235 | 73-239 |
| | | | (output trait) |
| OsMADS5 | O. sativa MADS box protein MADS5 | 30-180 | 106-225 |
| PN20770 | (U78890, AAB71434) | | (input trait) |
| (SEQ ID NO: 234) | | | 121-225 |
| | | | (output trait) |
| | | 1-247 | 2 × 109-225 |
| | | | (output trait) |
| | | 125-235 | 2 × 108-225 |
| | | | (output trait) |
| OsMADS6 | O. sativa MADS box protein MADS6 | 1-247 | 116-250 |
| PN20233 | (U78782, AAB64250) | | (output trait) |
| (SEQ ID NO: 236) | | | |
| OsMADS7 | O. sativa MADS box protein MADS7 | 1-247 | 5 × 1-250 |
| PN21116 | (U78891, AAC49816) | | (output trait) |
| (SEQ ID NO: 248) | | | |
| OsMADS8 | O. sativa MADS box protein MADS8 | 1-247 | 6 × 107-248 |
| PN20778 | (U78892, AAC49817) | | (output trait) |
| (SEQ ID NO: 250) | | | 75-248 |
| | | | (input trait) |
| | | 30-180 | 109-248 |
| | | | 74-183 |
| | | | (output trait) |
| | | 100-247 | 127-248 |
| | | | (output trait) |
| | | 125-235 | 2 × 79-248 |
| | | | (output trait) |
| OsMADS17 | O. sativa MADS box transcription factor | 1-247 | 106-249 |
| PN20914 | MADS17 | | (input trait) |
| (SEQ ID NO: 252) | (AF109153, AAF21900) | | |
| OsMADS45 | O. sativa O. sativa MADS box protein | 1-247 | 96-249 |
| PN20231 | MADS45 | | (input trait) |
| (SEQ ID NO: 202) | (U31994, AAB50180) | | 3 × 75-249 |
| | | | (output trait) |
| | | 30-180 | 61-248 |
| | | | (output trait) |
| | | 125-235 | 4 × 98-249 |
| | | | 3 × 69-249 |
| | | | (output trait) |
| OsPN22834 | Novel protein PN22834, similar to Oshox6, | 1-247 | 2 × 112-278 |
| (SEQ ID NO: 58) | fragment | | (input trait) |

[0600] TABLE 10
Interacting Proteins Identified for OsMADS6
(O. sativa MADS box protein MADS6)

| | | | |
|---|---|---|---|
| | Protein Name | Bait | Prey Coord |
| Gene Name | (GENBANK ® Accession No.) | Coord | (Source) |

BAIT PROTEIN

| | | |
|---|---|---|
| OsMADS6 | O. sativa MADS box protein MADS6 | 1-251* |
| PN20233 | (U78782, AAB64250) | 100-251* |
| (SEQ ID NO: 236) | | |

INTERACTORS

| | | | |
|---|---|---|---|
| Os008339 | O. sativa OS008339 MADS box transcription | 50-200 | 108-226 |
| PN20847 | factor, fragment | | (output trait) |
| (SEQ ID NO: 224) | (AJ293816) | | |
| OsBAA81880 | O. sativa MADS box-like protein | 50-200 | 2x 120-228 |
| PN20837 | (AB003322, BAA81880) | | (output trait) |
| (SEQ ID NO: 246) | | | |
| OsFDRMADS8 | O. sativa MADS-box protein FDRMADS8 | 50-200 | 91-233 |
| PN20698 | (AF141965, AAD38369) | | (output trait) |
| (SEQ ID NO: 228) | | | |
| OsMADS1 | O. sativa MADS box protein MADS1 | 50-200 | 3x 70-257 |
| PN19788 | (AF204063, AAG35652) | | (output trait) |
| (SEQ ID NO: 230) | | | |
| OsMADS5 | O. sativa MADS box protein MADS5 | 50-200 | 61-171 |
| PN20770 | (U78890, AAB71434) | | (output trait) |
| (SEQ ID NO: 234) | | | |
| OsMADS7 | O. sativa MADS box protein MADS7 | 50-200 | 95-259 |
| PN21116 | (U78891, AAC49816) | | (output trait) |
| (SEQ ID NO: 248) | | | |
| OsMADS8 | O. sativa MADS box protein MADS8 | 50-200 | 2x 79-248 |
| PN20778 | (U78892, AAC49817) | | 75-238 |
| (SEQ ID NO: 250) | | | (output trait) |
| OsMADS15 | O. sativa OSMADS15 | 50-200 | 73-183 |
| PN20842 | (AF058698, AAF19048) | | 1-176 |
| (SEQ ID NO: 240) | | | (output trait) |
| OsMADS18 | O. sativa MADS box transcription factor | 50-200 | 64-249 |
| PN20912 | MADS18 | | (output trait) |
| (SEQ ID NO: 242) | (AF091458, AAF04972) | | |
| OsMADS45 | O. sativa O. sativa MADS box protein | 50-200 | 83-234 |
| PN20231 | MADS45 | | (output trait) |
| (SEQ ID NO: 202) | (U31994, AAB50180) | | |
| OsPN29949 | Novel protein PN29949 putative MADS | 50-200 | 118-241 |
| (SEQ ID NO: 60) | protein | | 109-193 |
| | | | (output trait) |
| OsRAP1B | O. sativa AP1-like MADS box protein RAP1B | 50-200 | 1-188 |
| PN20232 | (AB041020, BAA94342) | | (input trait) |
| (SEQ ID NO: 244) | | | 1-179 |
| | | | (output trait) |
| OsRP5 | O. sativa Prolamin | 50-200 | 13-140 |
| PN19877 | (AF156714, AAF73991) | | (output trait) |
| (SEQ ID NO: 254) | | | |

*Self-activating clone, i.e., it activates the reporter genes in the two-hybrid system in the absence of a prey protein, and thus it was not used in the search.
NOTE:
Interactions of OsMADS6 with OsMADS14 and with OsMADS17, identified through a yeast two-hybrid system, are reported in the literature (Moon et al., 1999).

[0601] TABLE 11
Interacting Proteins Identified for OsFDRMADS8
(O. sativa MADS box protein FDRMADS8)

| | | | |
|---|---|---|---|
| | Protein Name | | Prey |
| | (GENBANK ® | | Coord |
| Gene Name | Accession No.) | Bait Coord | (Source) |

BAIT PROTEIN

| | |
|---|---|
| OsFDRMADS8 | O. sativa MADS-box |
| PN20698 | protein FDRMADS8 |
| (SEQ ID NO: 228) | (AF141965, AAD38369) |

INTERACTORS

| | | | |
|---|---|---|---|
| OsMADS45 | (O. sativa MADS box | 60-160 | 3x 56-249 |
| PN20231 | protein MADS45 | | (output |
| (SEQ ID NO: 202) | (U31994, AAB50180) | | trait) |

[0602] TABLE 12
Interacting Proteins Identified for OsMADS3
(O. sativa MADS box protein MADS3)

| | | | |
|---|---|---|---|
| | Protein Name | | |
| | (GENBANK ® | Bait | Prey Coord |
| Gene Name | Accession No.) | Coord | (Source) |

BAIT PROTEIN

| | | |
|---|---|---|
| OsMADS3 | O. sativa MADS box | 120-210* |
| PN20700 | protein MADS3 | 120-237* |
| (SEQ ID NO: 232) | (L37528, AAA99964) | |

INTERACTORS

| | | | |
|---|---|---|---|
| OsMADS8 | O. sativa MADS box | 70-170 | 61-248 |
| PN20778 | protein MADS8 | | (input trait) |
| (SEQ ID NO: 250) | (U78892, AAC49817) | | 6-159 |
| | | | 68-245 |
| | | | (output trait) |
| OsMADS45 | O. sativa O. sativa | 70-170 | 48-249 |
| PN20231 | MADS box protein | | (input trait) |
| (SEQ ID NO: 202) | MADS45 (U31994, | | 4x 2-214 |
| | AAB50180) | | 57-249 |
| | | | (output trait) |
| OsPN31165 | Novel protein PN31165 | 70-170 | 58-252 |
| (SEQ ID NO: 62) | | | (input trait) |

*Self-activating clone, i.e., it activates the reporter genes in the two-hybrid system in the absence of a prey protein, and thus it was not used in the search.

[0603] TABLE 13
Interacting Proteins Identified for OsMADS5
(O. sativa MADS box protein MADS5)

| | | | |
|---|---|---|---|
| | Protein Name | | Prey Coord |
| Gene Name | (GENBANK ® Accession No.) | Bait Coord | (Source) |

BAIT PROTEIN

| | | |
|---|---|---|
| OsMADS5 | O. sativa MADS box protein MADS5 | 100-226 |
| PN20770 | (U78890, AAB71434) | |
| (SEQ ID NO: 234) | | |

INTERACTORS

| | | | |
|---|---|---|---|
| OsFDRMADS6 | O. sativa MADS-box protein FDRMADS6 | 50-160 | 74-246 |
| PN19766 | (AF139664, AAF66997) | | (output trait) |
| (SEQ ID NO: 226) | | | |
| OsMADS13 | O. sativa MADS box protein MADS13 | 50-160 | 2x 69-230 |
| PN20668 | (AF151693, AAF13594) | | (output trait) |
| (SEQ ID NO: 238) | | | |
| OsMADS17 | O. sativa MADS box transcription factor | 50-160 | 51-248 |
| PN20914 | MADS17 | | (output trait) |
| (SEQ ID NO: 252) | (AF109153, AAF21900) | | |
| Os000564-1102 | Hypothetical protein 000564-1102 | 50-160 | 72-172 |
| PN20072 | | | (output trait) |
| (SEQ ID NO: 64) | | | |
| OsBAB56078 | O. sativa Hypothetical protein BAB56078 | 50-160 | 51-155 |
| PN28517 | (AP003106, BAB56078) | | (output trait) |
| (SEQ ID NO: 256) | | | |

[0604] TABLE 14
Interacting Proteins Identified for OsMADS15
(O. sativa MADS box protein MADS15)

| | | | |
|---|---|---|---|
| | Protein Name | | Prey Coord |
| Gene Name | (GENBANK ® Accession No.) | Bait Coord | (Source) |

BAIT PROTEIN

| | |
|---|---|
| OsMADS15 | O. sativa MADS box protein MADS15 |
| PN20842 | (AF058698, AAF19048) |
| (SEQ ID NO: 240) | |

INTERACTORS

| | | | |
|---|---|---|---|
| OsMADS1 | O. sativa MADS box protein MADS1 | 100-235 | 95-254 |
| PN19788 (11493806- | (AF204063, AAG35652) | | 4x 74-172 |
| OS015136 | | | (input trait) |
| (SEQ ID NO: 230) | | | |
| OsMADS45 | O. sativa O. sativa MADS box protein | 100-235 | 120-249 |
| PN20231 | MADS45 | | (output trait) |
| (SEQ ID NO: 202) | (U31994, AAB50180) | | |
| OsPN29971 | Novel protein PN29971, fragment, similar to | 100-235 | 2x 1-108 |
| (SEQ ID NO: 66) | A. thaliana centromere protein NP_191066 | | (input trait) |

O. sativa MADS Box Protein MADS45 (OsMADS45) as Bait

[0605] OsMADS45 (GENBANK® Accession No. AAB50180; Greco et al., 1997) is a 249-amino acid protein that includes a MADS box domain (amino acids 1 to 61), as predicted by amino acid sequence analysis (3.05e⁻⁴¹ prediction value). The analysis also predicted the existence of two coiled coils (amino acids 83 to 117 and amino acids 152 to 176). These coiled coils are likely part of a K-box predicted between amino acids 73 and 176 (3.7e⁻⁴⁵). The bait fragment used in this search encodes amino acids 50 to 198, a sequence that includes both predicted coiled coils and the K-box of OsMADS45. OsMADS45 is highly homologous to the AGL2 and AGL4 MADS box genes, which are thought to play an important role in the development of all floral organs by acting as intermediates between the meristem identity and organ identity genes (Greco et al., 1997; Savidge et al., 1995). In agreement with the expression pattern of AGL2 and AGL4, Northern blot and in situ hybridization experiments show that the rice OsMADS45 RNA is highly expressed in the floral meristem, in all the primordia, in mature floral organs, and in developing kernels (Greco et al., 1997), consistent with involvement in fruit development. However, temporal and spatial gene expression patterns only suggest that OsMADS45 and Arabidopsis AGL2 and AGL4 play similar roles in flower development (Greco et al., 1997).

[0606] A BLAST analysis comparing the nucleotide sequence of OsMADS45 against TMRI's GENECHIP® Rice Genome Array sequence database identified probeset OS014912_f_at (6e⁻⁶⁴ expectation value) and probeset OS000555_f_at (6e⁻⁶⁰) as the closest matches. Analysis of gene expression indicated that these genes are expressed early in seed development.

[0607] Proteins that were found to interact with OsMADS45 included Os008339 (GENBANK® Accession No. AJ293816), a 233-amino acid protein that includes a MADS box domain (amino acids 10 to 67, 8.4e⁻²⁹), which suggests that Os008339 is a member of the MADS box protein family. Analysis of the amino acid sequence also identified a K-box (amino acids 80 to 181) and a basic leucine zipper domain (bZIP; amino acids 156 to 186). The bZIP domain is often found in transcription factors and includes a basic DNA-binding region and a leucine zipper, which is associated with dimerization in many gene regulatory proteins (Landschulz et al., 1988; Busch et al., 1990; O'Shea et al., 1989). Thus this protein likely functions as do other MADS box family members, and its association with OsMADS45 represents a newly identified heterodimer presumably involved in transcriptional regulation of genes associated with development in rice. The prey clone of Os008339 retrieved encodes a region that spans most of the K-box in Os008339. The retrieval of this clone is consistent with OsMADS45 and Os008339 interacting through their respective K-boxes, as this domain is thought to include coiled coils used for protein interactions. Os008339 was also found to interact with the bait proteins OsRAP1B and OsMADS6 (see Table 9 and Table 10, respectively).

[0608] A BLAST analysis comparing the nucleotide sequence of Os008339 against TMRI's GENECHIP® Rice Genome Array sequence database identified probeset OS011977_i_at (7e⁻⁹¹ expectation value) as the closest match. Gene expression analysis indicated that this gene is not specifically induced by a broad range of plant stresses, herbicides, or applied hormones

[0609] OsMADS45 was also found to interact with O. sativa MADS box protein OsFDRMADS6 (GENBANK® Accession No. AF139664), a 246-amino acid protein that includes a MADS box domain (amino acids 1 to 61, 6.79e⁻³⁹), a coiled coil located C-terminal to the MADS box domain (amino acids 116 to 182). This predicted coiled coil is likely part of a K-box predicted between amino acids 73 and 174 (8.9e⁻⁴⁷), and its validity is supported by the fact that MADS box proteins bind DNA and modulate transcription as heterodimers. Previously published studies indicated that the FDRMADS6 transcript was present in flower, but not in root or shoot, and that transcripts were found in the spikelet apical meristem at the early stage of flower development and again at the late stage when flower organ primordia began differentiating (Jia et al., 2000). The OsFDRMADS6-OsMADS45 interaction has not been previously reported. OsFDRMADS6 was also found to interact with the bait proteins OsRAP1B (see Table 9) and OsMADS5 (see Table 13).

[0610] A BLAST analysis comparing the nucleotide sequence of OsFDRMADS6 against TMRI's GENECHIP® Rice Genome Array sequence database identified probeset OS003005.1_i_at (2e⁻⁸² expectation value) as the closest match. Gene expression analysis indicated this gene is not specifically induced by a broad range of plant stresses, herbicides, or applied hormones.

[0611] OsMADS45 also interacted with OsFDRMADS8 (GENBANK® Accession No. AF141965), a 233-amino acid protein with a MADS box domain between amino acids 1 and 60 (9.6e⁻³⁹) and a coiled coil signature (amino acids 122 to 178, prediction significance below threshold), as determined by amino acid sequence analysis. This putative coiled coil region overlaps with a K-box domain (amino acids 73 to 173, 1.3e⁻¹⁰). While no information is available in the literature about OsFDRMADS8, the presence of the MADS box and the K-box strongly suggests that it is a transcription factor of the MADS box family. The association of this protein with OsMADS45 suggests a role for OsFDRMADS8 in transcriptional regulation of genes involved in plant development. The OsFDRMADS8-OsMADS45 interaction has not been previously reported. OsFDRMADS8 was also found to interact with the bait proteins OsRAP1B and OsMADS6 (see Table 9 and Table 10).

[0612] OsFDRMADS8 was also constructed as a bait. Its interactions are shown in Table 11 and described later in this Example. A BLAST analysis comparing the nucleotide sequence of OsFDRMADS8 against TMRI's GENECHIP® Rice Genome Array sequence database identified probeset OS015116_at (2e⁻⁸² expectation value) as the closest match. Analysis of gene expression indicated that this gene is not specifically induced by a broad range of plant stresses, herbicides, or applied hormones.

[0613] The bait encoding amino acids 50 to 198 OsMADS45 was also found to interact with OsMADS1 (GENBANK® Accession No. AF204063), a 257-amino acid protein that is a member of the MADS box gene family. OsMADS1 includes a MADS domain (amino acids 1 to 60) and a coiled coil (amino acids 119 to 179), as determined by amino acid sequence analysis. OsMADS1 is a member of the AGL2 subfamily in the AP1/AGL9 family of MADS box genes (Moon et al., 1999). Ectopic expression of the OsMADS1 gene in homologous and heterologous plants results in early flowering, thereby suggesting a role for OsMADS1 in flower induction (Chung et al., 1994). OsMADS1 is expressed at the early stage through the later stages of flower development, with transcripts present in paleas/lemmas and carpels (Moon et al., 1999). The OsMADS1 homolog in the grass Lolium temulentum is expressed in the vegetative shoot apical meristem, and its expression increases strongly within 30 hours of long day floral induction, as determined by in situ hybridization (Gocal et al., 2001). The OsMADS1-OsMADS45 interaction has not been previously reported.

[0614] OsMADS1 was also found to interact with the bait proteins OsRAP1B (see Table 9), OsMADS6 (see Table 10), and OsMADS15 (see Table 14). A BLAST analysis comparing the nucleotide sequence of OsMADS1 against TMRI's GENECHIP® Rice Genome Array sequence database identified probeset OS000262_f_at and OS015136_f_at (5e⁻⁴⁶ and 2e⁻³⁶ expectation values, respectively) as the closest matches. Gene expression analysis indicated that this gene is not specifically induced by a broad range of plant stresses, herbicides, or applied hormones.

[0615] OsMADS45 was also found to interact with the MADS box protein OsMADS3. The 236-amino acid OsMADS3 protein (GENBANK® Accession No. L37528), includes a MADS box domain (amino acids 1 to 61) and, based on sequence homology, is structurally and functionally related to the AG gene family, as reported by Kang et al., 1995. RNA blot analysis and in situ localization studies showed that the OsMADS3 RNA transcript is preferentially expressed in reproductive organs, especially in stamen and carpel. Transgenic plants engineered to ectopically express the OsMADS3 gene exhibit altered morphology and coloration of the perianth organs, suggesting an important role for OsMADS3 in flower development. The OsMADS3-OsMADS45 interaction has not been previously reported.

[0616] OsMADS3 was also constructed as a bait protein. Its interactions are shown in Table 12 and described later in this Example. A BLAST analysis comparing the nucleotide sequence of OsMADS3 against TMRI's GENECHIP® Rice Genome Array sequence database identified probeset OS000554_f_at (e⁻⁴³ expectation value) as the closest match. Gene expression analysis indicated that this gene is not specifically induced by a broad range of plant stresses, herbicides, or applied hormones.

[0617] OsMADS45 was also found to interact with the rice MADS box protein OsMADS5. OsMADS5 (GENBANK® Accession No. U78890) is a 225-amino acid protein that includes a MADS box domain (amino acids 1 to 61, 3.17e⁻³⁹), as predicted by amino acid sequence analysis. Thus, OsMADS5 is a member of the MADS box protein family. Amino acid sequence analysis also predicted a coiled coil located C-terminal to the MADS box domain (amino acids 142 to 182), although with prediction significance below threshold. This coiled coil is likely part of a K-box predicted between amino acids 73 and 175 (3.4e⁻⁴⁰). OsMADS5 belongs to the AGL2 subfamily in the AP1/AGL9 family of MADS box genes, whose members are for the most part expressed at the early flowering stage (Moon et al., 1999). OsMADS5 is expressed throughout flower development, with higher expression in the early stages than the later stages and transcripts present in anthers and weakly in carpels, as reported by Kang et al., 1997. Ttransgenic plants ectopically expressing OsMADS5 exhibit the phenotype of weak dwarfism and early flowering, suggesting that this protein is involved in controlling flowering time. The OsMADS5-OsMADS45 interaction has not been previously reported.

[0618] OsMADS5 was also found to interact with the bait proteins OsRAP1B and OsMADS6 (see Table 9 and Table 10, respectively). OsMADS5 was also constructed as a bait protein. Its interactions are shown in Table 13 and described later in this Example.

[0619] A BLAST analysis comparing the nucleotide sequence of OsMADS5 against TMRI's GENECHIP® Rice Genome Array sequence database identified probeset OS011934_at (e⁻⁵⁸ expectation value) as the closest match. Analysis of temporal and spatial patterns of gene expression indicated that this gene is specifically expressed in panicle, in agreement with expression data previously reported for the OsMADS5 gene (Kang et al., 1997). Further, gene expression experiments indicated that the OsMADS5 gene is not specifically induced by a broad range of plant stresses, herbicides, or applied hormones.

[0620] OsMADS45 was also found to interact with rice MADS box protein OsMADS6. OsMADS6 (GENBANK® Accession No. U78782) is a 250-amino acid protein that includes a MADS box domain (amino acids 1 to 59, 3.3e⁻⁴²), as determined by amino acid sequence analysis. Thus, OsMADS6 is a member of the MADS box protein family. The analysis also predicted a K-box (amino acids 72 to 172, 3.4e⁻⁴⁷). In support of the existence of a K-box, the analysis also predicted a coiled coil (amino acids 118 to 172). Moon et al., 1999 report that OsMADS6, like OsMADS14, belongs to the AP1/AGL9 family of genes which control the specification of meristem and organ identity in developing flowers. Both OsMADS6 and OsMADS14 are expressed from the early through the later stages of flower development, with OsMADS6 transcripts detectable in lodicules and also weakly in sterile lemmas and carpels of mature flowers (Moon et al., 1999). Thus, these genes can regulate a very early stage of flower development, based on the observation that transgenic plants ectopically expressing OsMADS6 and OsMADS14 exhibited extreme early flowering and dwarfism. The OsMADS6-OsMADS45 interaction has not been previously reported.

[0621] OsMADS6 was also found to interact with the bait protein OsRAP1B (see Table 9). OsMADS6 was also used as a bait. Its interactors are shown in Table 10 and described later in in this Example. A BLAST analysis comparing the nucleotide sequence of OsMADS6 against TMRI's GENECHIP® Rice Genome Array sequence database identified probeset OS000571_f_at (e⁻⁷ expectation value) as the closest match. The expectation value is too low for this probeset to be a reliable indicator of the gene expression of OsMADS6.

[0622] OsMADS45 was also found to interact with rice MADS box protein OsMADS 13). OsMADS13 (GENBANK® Accession No. AF151693) is a 250-amino acid protein that includes a MADS box domain (amino acids 1 to 61). Lopez-Dee et al., 1999 determined that this gene is the ortholog of ZAG2, a maize MADS-box gene expressed mainly in the ovule, and of the ZAG2 paralogous gene ZMM1. The OsMADS13 gene is highly expressed in developing ovules and can play a role in rice ovule and seed development (Lopez-Dee et al., 1999). Ovules are contained in the carpel, structures in the flowers of seed plants such as rice, and they develop into seeds after fertilization. The OsMADS13-OsMADS45 interaction has not been previously reported.

[0623] OSMADS13 was also found to interact with the bait protein OSMADS5 (see Table 13). A BLAST analysis comparing the nucleotide sequence of OsMADS13 against TMRI's GENECHIP® Rice Genome Array sequence database identified probeset OS000554_f_at (e⁻⁷⁷ expectation value) as the closest match. Gene expression analysis indicated that this gene is not specifically induced by a broad range of plant stresses, herbicides, or applied hormones.

[0624] OsMADS45 was also found to interact with rice MADS box protein OsMADS14. OsMADS14 (GENBANK® Accession No. AF058697) is a 246-amino acid protein that includes a MADS box domain (amino acids 1 to 61). OsMADS14 is homologous to the maize AP1 homolog ZAP1 and os a member of the SQUAMOSA-like (SQUA) subfamily in the AP1/AGL9 family of MADS box genes, which control the specification of meristem and organ identity in developing flowers (Moon et al., 1999). OsMADS14, as well as OsMADS6, is expressed from the early through the later stages of flower development, with OsMADS14 transcripts detectable in sterile lemmas, paleas/lemmas, stamens, and carpels of mature flowers. Thus, these genes can regulate a very early stage of flower development, based on the observation that transgenic plants ectopically expressing OsMADS14 and OsMADS6 exhibit extreme early flowering and dwarfism (Moon et al., 1999). The OsMADS14-OsMADS45 interaction has not been previously reported.

[0625] OsMADS14 was also found to interact with Os018989-4003 (hypothetical protein 018989-4003 similar to Triticum sp. DP Protein). Using a yeast two-hybrid system, OsMADS14 has also been reported to interact with with OsMADS1 (Lim et al., 1999) and with OsMADS6 (Moon et al., 1999). While the K domain is essential for the interaction between OsMADS14 and OsMADS1, a region preceded by the K domain augments this interaction (Lim et al., 1999). Likewise, a 14-amino acid region located immediately downstream of the K domain enhances the OsMADS14-OsMADS6 interaction, and the two leucine residues within this region play an important role in that enhancement (Moon et al., 1999). A BLAST analysis comparing the nucleotide sequence of OsMADS13 against TMRI's GENECHIP® Rice Genome Array sequence database identified probeset OS003005.1_i_at (e⁻⁸² expectation value) as the closest match. Gene expression analysis indicated that this gene is not specifically induced by a broad range of plant stresses, herbicides, or applied hormones.

[0626] OsMADS45 was also found to interact with rice MADS box protein OsMADS 15. OsMADS15 (GENBANK® Accession No. U78782) is a 267-amino acid protein with a MADS box domain between amino acids 1 and 60, as determined by amino acid sequence analysis (5.39e⁻⁴² prediction value). The analysis also predicted a coiled coil signature (amino acids 145 to 184). This putative coiled coil region overlaps with a predicted K-box domain (amino acids 73 to 174, 1.20e⁻⁴⁰). OsMADS15 is homologous to the maize AP1 homolog ZAP1 and is classified as a member of the SQUAMOSA-like (SQUA) subfamily in the AP1/AGL9 family of MADS box genes, which control the specification of meristem and organ identity in developing flowers (Moon et al., 1999). The OsMADS15-OsMADS45 interaction represents a heterodimer that has not been previously reported.

[0627] OsMADS15 was also found to interact with the bait protein OsMADS6 (see Table 10). OsMADS15 was also constructed as a bait protein. Its interactions are shown in Table 14 and described later in this Example. A BLAST analysis comparing the nucleotide sequence of OsMADS15 against TMRI's GENECHIP® Rice Genome Array sequence database identified probeset OS015053_f_at (e⁻⁷⁷ expectation value) as the closest match. Gene expression analysis indicated that this gene is not specifically induced by a broad range of plant stresses, herbicides, or applied hormones.

[0628] OsMADS45 was also found to interact with rice MADS box protein OsMADS18. OsMADS18 (GENBANK® Accession No. AF091458) is a 249-amino acid protein with a MADS box domain between amino acids 1 and 60 (1.67e⁻³⁸), as determined by amino acid sequence analysis. This amino acid sequence analysis also predicted a coiled coil signature (amino acids 141 to 191). This putative coiled coil region overlaps with a K-box domain (amino acids 73 to 173, 3.80e⁻³²). OsMADS18 is highly homologous to the maize AP1 homolog ZAP1 and belongs to the SQUA subfamily in the AP1/AGL9 family of MADS box genes, which control the specification of meristem and organ identity in developing flowers (Moon et al., 1999). The OsMADS18-OsMADS45 interaction represents a heterodimer that has not been previously reported.

[0629] OsMADS18 was also found to interact with OsMADS6 (see Table 10). A BLAST analysis comparing the nucleotide sequence of OsMADS18 against TMRI's GENECHIP® Rice Genome Array sequence database identified probeset OS015196_i_at (e⁻⁵⁸ expectation value) as the closest match. Gene expression analysis indicated that this gene is not specifically induced by a broad range of plant stresses, herbicides, or applied hormones.

[0630] OsMADS45 was also found to interact with the novel rice protein OsPN23495. OsPN23495 is a novel 335-amino acid protein. A BLAST analysis indicated that OsPN23495 is similar to expressed protein from A. thaliana (GENBANK® Accession No. NM_{—}129661, 42.1% identity, 2e⁻⁰⁵⁴), for which no information is available in the public domain. However, OsPN23495 was also found to interact with two rice hypothetical proteins (Os006111-3329 and Os020134-3170) which are similar to the zinc/DNA-binding ascorbate oxidase promoter binding protein (AOBP) from Curcurbita maxima, and which include a Dof domain zinc finger DNA-binding domain (amino acids 103 to 165, 1.9e⁻³⁷ for Os006111-33229; amino acids 101 to 163, 3.8e⁻³⁸ for Os020134-3170). The presence of the Dof domain suggests that these two proteins are transcriptional regulators. Thus, by virtue of its interaction with these two proteins and with OsMADS45, novel protein PN23495 can be a novel transcription factor involved in regulation of genes controlling plant development. The OsPN23495-OsMADS45 interaction is a newly identified interaction.

[0631] A BLAST analysis comparing the nucleotide sequence of OsPN23495 against TMRI's GENECHIP® Rice Genome Array sequence database identified probeset OS001986_at (e=0 expectation value) as the closest match. Gene expression analysis indicated that this gene is not specifically induced by a broad range of plant stresses, herbicides, or applied hormones.

[0632] OsMADS45 was also found to interact with AP-1 like MADS box protein OsRAP1B. OsRAP1B (GENBANK® Accession No. AB041020) is a 246-amino acid protein encoded by a member of the MADS box gene family. It includes a MADS box domain between amino acids 1 and 60. OsRAP1B was identified by Kyozuka et al., 2000 as a putative rice ortholog of the Arabidopsis APETALA1 (AP1), a class of MADS box genes involved in specification of floral organ identity. The OsRAP1B-OsMADS45 interaction has not been previously reported.

[0633] OsRAP1B was also constructed as a bait. Its interactors are listed in Table 9 and described later in this Example. These OsRAP1B interactors include prey clones of OsMADS45. A BLAST analysis comparing the nucleotide sequence of OsRAP1B against TMRI's GENECHIP® Rice Genome Array sequence database identified probeset OS003005.1_I_at (2e⁻⁸² expectation value) as the closest match. Gene expression analysis indicated that this gene is expressed in roots and leaves and more highly expressed in flowers, panicles, and seeds. The gene is not specifically induced by a broad range of plant stresses, herbicides, or applied hormones.

Two-Hybrid System Using OsRAP1B as Bait

[0634] Bait constructs containing the O. sativa AP1-like MADS box protein RAP1B (OsRAP1B) were constructed to search for interacting proteins. This protein is described in earlier in this Example as an interactor for OsMADS45. Several bait fragments were used in the search encompassing amino acids 1-150, 125-235, 1-247, 100-247, 65-200, and 30-180 of OsRAP1B (see Table 9).

[0635] A bait encoding amino acids 1-150 of OsRAP1B was found to interact with a fragment of the transcription factor Os008339. This protein is described earlier in this Example as an interactor for the bait protein OsMADS45. The Os008339-OsRAP1B interaction has not been previously reported.

[0636] A bait encoding amino acids 125-235 of OsRAP1B was also found to interact with rice MADS box-like protein OsBAA81880. OsBAA81880 (GENBANK® Accession No. AB003322) is a 228-amino acid protein with a MADS box domain between amino acids 1 and 60 (4.59e⁻³⁶), as determined by amino acid sequence analysis. The analysis also detected two coiled-coil signatures (amino acids 83 to 113 and amino acids 140 to 174). These putative coiled coil regions overlap with a K-box domain (amino acids 73 to 173, 3.80e⁻³²). The OsBAA81880 protein is not described in the literature; however, the presence of the MADS box and K-box strongly suggests that it is a transcription factor of the MADS box family, and its interaction with OsRAP1B is likely involved in transcriptional regulation of genes associated with plant development.

[0637] OsBAA81880 was also found to interact with OsMADS6 (see. Table 10). A BLAST analysis comparing the nucleotide sequence of OsBAA81880 against TMRI's GENECHIP® Rice Genome Array sequence database identified probeset OS011977_i_at and OS011794_i_at (e⁻²⁵ and e⁻¹² expectation values, respectively) as the closest matches. The expectation values are too low for these probesets to be reliable indicators of the gene expression of OsBAA81880.

[0638] Baits encoding amino acids 1-247 of OsRAP1B and amino acids 100-247 of OsRAP1B were also found to interact with rice MADS-box protein FDRMADS6. This protein is described in earlier in this Example as an interactor for the bait protein OsMADS45. The OsFDRMADS6-OsRAP1B interaction has not been previously reported.

[0639] Baits encoding amino acids 1-247 of OsRAP1B and amino acids 100-247 of OsRAP1B was also found to interact with rice MADS box protein OsFDRMADS8. This protein is described earlier in this Example as an interactor for the OsMADS45 bait protein. The OsFDRMADS8-OsRAP1B interaction represents a heterodimer that has not been previously reported.

[0640] Baits encoding amino acids 1-247 of OsRAP1B, amino acids 100-247 of OsRAP1B, amino acids 65-200 of OsRAP1B, and amino acids 125-235 of OsRAP1B was also found to interact with MADS box protein OsMADS1. This protein is described herein as an interactor for the OsMADS45 bait protein. The OsMADS1-OsRAP1B interaction has not been previously reported.

[0641] Baits encoding amino acids 30-80 of OsRAP1B, amino acids 1-247 of OsRAP1B, amino acids 125-235 of OsRAP1B were also found to interact with rice MADS box protein OsMADS5. This protein is described herein as an interactor for the OsMADS45 bait protein. The OsMADS5-OsRAP1B interaction has not been previously reported.

[0642] A bait encoding amino acids 1-247 of OsRAP1B was also found to interact with rice MADS box protein OsMADS6. This protein is described earlier in this Example as an interactor for the OsMADS45 bait protein. The OsMADS6-OsRAP1B interaction has not been previously reported.

[0643] A bait encoding amino acids 1-247 of OsRAP1B was also found to interact with rice MADS box protein OsMADS7. OsMADS7 (GENBANK®Accession No. U78891) is a 259-amino acid protein with a MADS box domain between amino acids 11 and 71 (3.22e⁻⁴⁰), as predicted by analysis of the amino acid sequence. The analysis also predicted two coiled-coil signatures (amino acids 93 to 126 and 162 to 186). These coiled coils do not overlap with the MADS box domain. OsMADS7, as well as OsMADS8, is structurally related to the AGL2 gene family based on sequence homology and is a flower-specific MADS box gene (Kang et al., 1997). Both genes are expressed from the young flower stage through the late stage of flower development, with transcripts detected primarily in carpels and also weakly in anthers (Kang et al., 1997). In support of an important role for OsMADS7 in flower development, specifically, in controlling flowering time, transgenic tobacco plants engineered to express the OsMADS7 gene were observed to exhibit early flowering and dwarfism (Kang et al., 1997). The OsMADS7-OsRAP1B interaction has not been previously reported.

[0644] OsMADS7 was also found to interact with OsMADS6 (see Table 10). A BLAST analysis comparing the nucleotide sequence of OsMADS8 against TMRI's GENECHIP® Rice Genome Array sequence database identified probeset OS014912_f_at (e⁻⁶¹ expectation value) as the closest match. Gene expression analysis indicated that this gene is expressed early in seed development and is not specifically induced by a broad range of plant stresses, herbicides, or applied hormones.

[0645] Baits encoding amino acids 1-247, 30-180, 100-247, and 125-235 of OsRAP1B were found to interact with rice MADS box protein OsMADS8. OsMADS8 (GENBANK® Accession No. U78892) is a 248-amino acid protein that includes a MADS box domain (amino acids 1 to 61, 3 e⁻⁴⁰), as determined by amino acid sequence analysis. Thus, OsMADS8 is a member of the MADS box protein family. The amino acid sequence analysis also predicted a coiled coil C-terminal to the MADS box domain (amino acids 87 to 117). This coiled coil is likely part of a K-box predicted between amino acids 73 and 176 (8.9e⁻⁴⁴ prediction value). OsMADS8, as well as OsMADS7, is structurally related to the AGL2 gene family, as determined by sequence homology, and is a flower-specific MADS box gene (Kang et al., 1997). Both genes are expressed from the young flower stage through the late stage of flower development, with transcripts detectable primarily in carpels and also weakly in anthers (Kang et al., 1997). In support of an important role for OsMADS7 and OsMADS8 in flower development, specifically, in controlling flowering time, is the observation that transgenic tobacco plants engineered to express these genes exhibit early flowering and dwarfism (Kang et al., 1997). The OsMADS8-OsRAP1B interaction represents a heterodimer that has not been previously reported.

[0646] OsMADS8 was also found to interact with the bait proteins OsMADS6 (see Table 10) and OsMADS3 (see Table 12). A BLAST analysis comparing the nucleotide sequence of OsMADS8 against TMRI's GENECHIP® Rice Genome Array sequence database identified probeset OS015209_at (e⁻⁸³ expectation value) as the closest match. Analysis of temporal and spatial patterns of gene expression indicated that this gene is expressed early in seed development. Analysis of gene expression in response to various inducers indicated that it is not specifically induced by a broad range of plant stresses, herbicides, or applied hormones.

[0647] A bait encoding amino acids 1-247 of OsRAP1B was found to interact with rice MADS box protein OsMADS17. OsMADS17 (GENBANK® Accession No. AF109153) is a 249-amino acid protein that includes a MADS box domain (amino acids 1 to 61), as determined by amino acid sequence analysis (4.31e⁻⁴¹ prediction value). Thus, OsMADS17 is a member of the MADS box protein family. The amino acid sequence analysis also predicted a coiled coil located C-terminal to the MADS box domain (amino acids 122 to 178). This predicted coiled coil is likely part of a K-box predicted between amino acids 72 and 174 (5.2e⁻⁴⁴). The OsMADS17 gene is homologous to ZAG3, the maize homolog of Arabidopsis AG, and belongs to the AGL6 subfamily in the AP1/AGL9 family of MADS box genes (Moon et al., 1999). The OsMADS17-OsRAP1B interaction represents a heterodimer that has not been previously reported. The prey clone of OsMADS17 retrieved in the screen includes the predicted coiled coil and most of the K-box in OsMADS17.

[0648] OsMADS17 was also found to interact with the bait protein OsMADS5 (see Table 13). An interaction of OsMADS17 with OsMADS6 has also been reported (Moon et al., 1999). A BLAST analysis comparing the nucleotide sequence of OsMADS8 against TMRI's GENECHIP® Rice Genome Array sequence database identified probeset OS000571 f_at (e⁻⁶⁰ expectation value) as the closest match. Analysis of gene expression indicated that this gene is not specifically induced by a broad range of plant stresses, herbicides, or applied hormones.

[0649] Baits encoding amino acids 1-247, 30-180, and 125-235 of OsRAP1B were also found to interact with the rice MADS box protein OsMADS45, as has described earlier in this Example. This interaction confirms the interaction between the two proteins used in the reverse bait/prey roles in the yeast two-hybrid system (see Table 1).

[0650] A bait encoding amino acids 1-247 of OsRAP1B was also found to interact with novel protein OsPN22834, a protein sharing similarity with Oshox6. OsPN22834 is a 278-amino acid protein that includes a homeobox domain between amino acids 70 and 131, a transposase 8 domain between amino acids 1 and 93, and a bZIP transcription factor domain between amino acids 129 and 167. Hox genes are well defined as modulators of development and pattern formation in a variety or species and organ systems (Fromental-Ramain et al., 1996; Godwin et al., 1998). These genes code for transcription factors that modulate expression of developmentally regulated genes. While most of the published studies pertaining to Hox proteins utilize mouse models, Hox gene products have also been shown to regulate development in plants (Holk et al., 1996). The OsRAP1B-OsPN22834 interaction represents a previously unreported heterodimer of a MADS box protein with a hox gene product.

Two-Hybrid System Using OsMADS6 as Bait

[0651] O. sativa MADS box protein MADS6 was also used as a bait protein to identify interactors. This protein is described earlier in this Example as an interactor for the bait protein OsMADS45. The bait fragment used in this search encodes amino acids 50 to 200, a sequence that includes the predicted coiled coil and the K-box of OsMADS6.

[0652] OsMADS6 was found to interact with O. sativa OS008339 MADS box transcription factor (Os008339). This protein is described earlier in this Example as an interactor for the bait protein OsMADS45. The Os008339-OsMADS6 interaction represents a newly identified interaction that is likely involved in transcriptional regulation of genes associated with development in rice.

[0653] OsMADS6 was also found to interact with the O. sativa MADS box-like protein OsBAA81880. This protein is described earlier in this Example as an interactor for the bait protein OsRAP1B. The OsBAA81880-OsRAP1B interaction represents a heterodimer that has not been previously reported.

[0654] OsMADS6 was also found to interact with O. sativa MADS-box protein OsFDRMADS8. This protein is earlier in this Example as an interactor for the bait protein OsMADS45. The OsFDRMADS8-OsMADS6 interaction has not been previously reported.

[0655] OsMADS6 was also found to interact with O. sativa MADS box protein OsMADS1. This protein is described earlier in this Example as an interactor for the bait protein OsMADS45. This interaction confirms a previous work by Moon et al., 1999, which described the same interaction using a yeast two-hybrid system.

[0656] OsMADS6 was also found to interact with O. sativa MADS box protein OsMADS5. This protein is described earlier in this Example as an interactor for the bait protein OsMADS45. This interaction confirms a previous work by Moon et al., 1999, which described the same interaction using a yeast two-hybrid system.

[0657] OsMADS6 was also found to interact with O. sativa MADS box protein OsMADS7. This protein is described earlier in this Example as an interactor for the bait protein OsRAP1B. This interaction confirms a previous work by Moon et al., 1999, which described the same interaction using a yeast two-hybrid system.

[0658] OsMADS6 was also found to interact with O. sativa MADS box protein OsMADS8. This protein is described earlier in this Example as an interactor for the bait protein OsRAP1B. This interaction confirms a previous work by Moon et al., 1999, which described the same interaction using a yeast two-hybrid system.

[0659] OsMADS6 was also found to interact with O. sativa MADS box protein OsMADS15. This protein is described earlier in this Example as an interactor for OsMADS45. Its interaction with OsMADS6 confirms a previous work by Moon et al., 1999, which described the same interaction using the yeast two-hybrid system.

[0660] OsMADS6 was also found to interact with O. sativa MADS box protein OsMADS18. This protein is described earlier in this Example as an interactor for OsMADS45. Its interaction with OsMADS6 confirms a previous work by Moon et al., 1999, which described MADS18, as well as MADS14, MADS15, and MADS17, as interactors for MADS6 using the yeast two-hybrid system.

[0661] OsMADS6 was also found to interact with O. sativa MADS box protein OsMADS45. This protein is described earlier in this Example as a bait. The OsMADS45-OsMADS6 interaction confirms the interaction observed using OsMADS45 as bait, and represents a newly identified interaction.

[0662] OsMADS6 was also found to interact with novel protein OsPN29949. OsPN29949 is a novel 241-amino acid protein that includes a MADS box domain (amino acids 1-61). The presence of this domain suggests that this protein is a member of the MADS box protein family. Amino acid alignment analysis of the interacting clones (see FIGS. 3A and 3B) showed that OsPN29949 shares high sequence similarity with OsMADS18, a member of the SQUA subfamily of AP1-like MADS box proteins. OsPN29949 can thus be classified in this group of genes, which are known to be involved in specification of floral organ primordia in snapdragon (reviewed in Moon et al., 1999). The OsPN29949-OsMADS6 interaction represents a newly identified heterodimer that is likely involved in transcriptional regulation of genes associated with development in rice.

[0663] Two prey clones encoding amino acids 118-241 and 109-193 of OsPN29949 were retrieved in the screen. These sequences suggest that the domain responsible for the OsPN29949-OsMADS6 interaction resides between amino acids 118 and 193, which includes the K box (amino acids 95-169; see alignment analysis in FIGS. 3A-3D). There is no match for the OsPN29949 gene on TMRI's GENECHIP® Rice Genome Array.

[0664] OsMADS6 was also found to interact with O. sativa AP-like MADS box protein OsRAP1B. This protein is described earlier in this Example as an interactor for the bait protein OsMADS45, and was also used as a bait whose interactions are also reported earlier in this Example. The OsRAP1B-OsMADS6 interaction represents a heterodimer that has not been previously reported.

[0665] OsMADS6 was also found to interact with O. sativa prolamin (OsRP5). Prolamin (GENBANK® Accession Nos. AF156714, AAF73991) is a 156-amino acid protein with a cleavable signal peptide domain (amino acids 1-19), as determined by analysis of the amino acid sequence. Prolamins are seed storage proteins unique to the endosperm of cereals. Seed storage proteins consist of polypeptide chains that are synthesized during seed development and serve as the main source of amino acids for germination and seedling growth. Prolamins accumulate in protein bodies derived from the endoplasmic reticulum (ER). The presence of the cleavable signal peptide domain in OsRP5 is consistent with the structure of prolamins, which possess signal peptides that direct the newly translated polypeptides into the lumen of the ER and are then proteolytically removed. In the ER, prolamins form aggregates and subsequently pinch off to form protein bodies surrounded by an ER-derived membrane (the molecular structure of seed storage proteins and the mechanisms for their delivery into the vacuoles in seeds are discussed in Buchanan et al., 2002). The OsRP5-OsMADS6 interaction represents a previously unreported heterodimer.

[0666] In addition to OsMADS6, the prolamin OsRP5 was found to interact with rice hypothetical protein Os006111-3329, which is similar to the zinc/DNA-binding ascorbate oxidase promoter binding protein (AOBP) from Curcurbita maxima and which includes a Dof domain zinc finger DNA-binding domain (amino acids 103 to 165, 1.9e⁻³⁷). The presence of the Dof domain suggests that Os006111-3329 is a transcriptional regulator. The interaction of prolamin with this protein and with OsMADS6 can represent steps in the transcriptional regulation of genes controlling seed development.

[0667] A BLAST analysis comparing the nucleotide sequence of prolamin against TMRI's GENECHIP® Rice Genome Array sequence database identified probeset OS000235_at (e⁻¹⁵⁵ expectation value) as the closest match. Analysis of gene expression indicated that this gene is not specifically induced by a broad range of plant stresses, herbicides, or applied hormones.

Two-Hybrid System Using OsFDRMADS8 as Bait

[0668] Two-hybrid assays were also performed using the O. sativa MADS-box protein FDRMADS8 as bait. This protein is described earlier in this Example as an interactor for the bait protein OsMADS45. The bait clone used in the screen encodes amino acids 60 to 160 of OsFDRMADS8.

[0669] OsFDRMADS8 was found to interact with OsMADS45. This protein is described as a bait earlier in this Example. The OsFDRMADS8-OsMADS45 interaction confirms the interaction between the two proteins used in the reverse bait/prey roles in the yeast two-hybrid system.

Two-Hybrid System Using OsMADS3 as Bait

[0670] Two-hybrid assays were also performed using O. sativa MADS box protein MADS3 as bait. This protein is described earlier in this Example as an interactor for the bait protein OsMADS45. The bait clone used in the screen encodes amino acids 70 to 170 of OsMADS3.

[0671] OsMADS3 was found to interact with MADS box protein OsMADS8. This protein is described earlier in this Example as an interactor for the bait protein OsRAP1B. The OsMAD8-OsMADS3 interaction has not been previously reported.

[0672] OsMADS3 was also found to interact with OsMADS45. This protein is described as a bait earlier in this Example. The OsMADS45-OsMADS3 interaction confirms the interaction between the two proteins used in the reverse bait/prey roles in the yeast two-hybrid system.

[0673] OsMADS3 was also found to interact with OsPN31165, a novel 301-amino acid protein similar to three proteins of unknown function from A. thaliana (the first hit being unknown protein, GENBANK® Accession No. NP_{—}565966, 62% identity; 2e⁻⁰⁸⁷), as determined by BLAST analysis. While the function of OsPN31165 is unknown, its association with OsMADS3 suggests a role for OsPN31165 in plant development, most likely flower development. The OsMADS3-OsPN31165 interaction represents a newly identified heterodimer.

Two-Hybrid Assay Using OsMADS5 as Bait

[0674] Two hybrid assays were also performed using OsMADS5 as bait. This protein is described earlier in this Example as an interactor for OsMADS45. The bait clone used in the screen encodes amino acids 50 to 160 of OsMADS5.

[0675] OsMADS5 was found to interact with OsFDRMADS6. This protein is described earlier in this Example as an interactor for OsMADS45. The OsFDRMADS6-OsMADS5 interaction represents a heterodimer that has not been previously reported.

[0676] OSMADS5 was found to interact with OsMADS13. This protein is described earlier in this Example as an interactor for OsMADS45. The OsMADS13-OsMADS5 interaction has not been previously reported.

[0677] OsMADS5 was also found to interact with OsMADS17. This protein is described earlier in this Example as an interactor for OsRAP1B. The OsMADS17-OsMADS5 interaction has not been previously reported.

[0678] OsMADS5 was also found to interact with hypothetical protein 000564-1102 (Os000546-1102). Os000564-1102 is a novel 262-amino acid protein similar to the 14-3-3-like homolog GF14-b protein from rice (GENBANK® Accession No. AAB07456.1; 98% identity; 1e⁻¹⁴¹), as determined by BLAST analysis. 14-3-3 proteins include two highly conserved signature patterns: the first is a peptide of 11 amino acids located in the N-terminal section; the second is a 20-amino acid region located in the C-terminal section. Amino acid sequence analysis of Os000564-1102 identified a 14-3-3 signature 1 beginning with amino acid 49 and a 14-3-3 signature 2 beginning with amino acid 221. The 14-3-3 family members interact with, and thereby regulate, proteins that are involved in a variety of signaling pathways including transcriptional regulation. It is likely that Os000564-1102 is a 14-3-3 protein that regulates nuclear events such as transcription by participating in protein-protein interactions. Given the involvement of OsMADS5 in flower development, the interaction between OsMADS5 and Os000564-1102 likely represents a newly identified heterodimer involved in control of transcriptional events associated with plant development, and that Os000564-1102 modulates the MADS box transcription factor function as a member of the 14-3-3 family.

[0679] OsMADS6 was also found to interact with rice hypothetical protein BAB56078. This protein is a direct submission to the public domain (GENBANK® Accession No. BAB56078) and is not described in the literature. However, its association with OsMADS5 suggests a role for OsBAB56078 in plant development and this association represents a heterodimer that has not been previously reported.

[0680] OsBAB56078 was also found to interact with the rice 14-3-3 protein homolog GF14-b (OsGF14-b), which is up-regulated by stress and the plant hormone abscisic acid (as determined by gene expression analysis; see Example V), and with the transcription factor NAC2 (OsORF01393-P14).

Two-Hybrid Assays Using OsMADS15 as Bait

[0681] Two-hybrid assays were also performed using OsMADS15 as bait. This protein is described earlier in this Example as an interactor for OsMADS45. The bait clone used in the screen encodes amino acids 100 to 235 of OsMADS15.

[0682] OsMADS15 was found to interact with MADS box protein OsMADS1. This protein is described herein as an interactor for OsMADS45. The OsMADS1-OsMADS15 interaction confirms a previous work by Lim et al., 2000, which describes OsMADS15 as well as OsMADS14 as interactors for OsMADS1 using the yeast two-hybrid system and determined that, while the K domain is essential for the interaction between these proteins, a region preceded by the K domain augments this interaction.

[0683] OsMADS15 was also found to interact with OsMADS45. This protein is described herein as a bait protein. The OsMADS45-OsMADS15 interaction confirms the interaction between the two proteins used in, the reverse bait/prey roles in the yeast two-hybrid system.

[0684] OsMADS15 was also found to interact with OsPN29971, a 108-amino acid protein determined by BLAST analysis to be similar to centromere protein-like from A. thaliana (GENBANK® Accession No. 191066.1; 31.1% identity; 9e⁻⁰⁹). The centromere is a region of the chromosome associated with kinetochores, protein-rich structures that are the main sites of interaction between cytoskeletal structures and chromosomes during mitosis and meiosis. Centromere proteins in animals have been implicated in chromosome segregation and cytokinesis events. OsPN29971 can represent a novel centromere-kinetochore-associated protein in plants. Its association with the MADS box protein OsMADS15 represents a newly identified heterodimer that likely regulates transcriptional events related to cell division during plant development.

Summary

[0685] The interacting proteins isolated in the two-hybrid screen using OsMADS45, OsRAP1B, and OsMADS6 as baits form a network comprised mainly of MADS box transcription factors. This indicates that MADS box proteins efficiently interact with each other in yeast, as previously reported (Moon et al., 1999).

[0686] Among the interactors found are the previously identified MADS box proteins Os008339, OsFDRMADS6, OsFDRMADS8, OsMADS1, OsMADS3, OsMADS5, OsMADS6, OsMADS7, OsMADS8, OsMADS13, OsMADS14, OsMADS15, OsMADS17, OsMADS18, OsBAA81880, OsMADS45, OsRAP1B and OsMADS6, and the novel protein OsPN29949 (which interacted with OsMADS6). Because MADS box proteins are known to mediate various plant developmental processes as heterodimers, and given the involvement of the bait proteins OsMADS45, OsRAP1B and OsMADS6 in the regulation of flower development, the interactions between the MADS box proteins identified in this Example likely represent a network of heterodimers that regulate transcription of genes associated with plant development in rice. Some of these interactions represent previously unreported heterodimers, as indicated in the description of each interactor hereinabove.

[0687] Five additional novel interactors were identified: OsPN23495 is a putative transcriptional regulator that, by association with OsMADS45, is also likely involved in flower development. OsPN22834 is a putative hox gene product. Both MADS box proteins and Hox gene products are well known for their roles in developmental processes, MADS box proteins being linked to flower and fruit development and Hox proteins to embryonic development in plants (Holk et al., 1996). The interaction between RAP1B and OsPN22834 can signify a previously unknown role for one or both of these proteins in the development of the rice plant. Os000564-1102 is a putative 14-3-3 protein that presumably modulates the function of the MADS box transcription factor OsMADS5 with which it interacts. OsPN29971 is a protein whose similarity to a centromere-like protein from Arabidopsis (although with low prediction significance) suggests a role in cell division events. The interaction of OsPN29971 with the MADS box protein OsMADS15 is likely involved in regulating transcription of genes during cell division events related to plant development. Finally, OsPN31165 is a protein of unknown function, which by virtue of its interaction with OsMADS3 is likely involved in regulation of plant developmental processes. The association of these novel interactors with the MADS box bait proteins of this Example represent newly identified heterodimers.

[0688] Another newly characterized heterodimer reported in this Example is that between OsMADS6 and the seed storage protein prolamin (OsRP5). Expression of storage proteins and timing of their appearance in developing seeds is regulated both transcriptionally and post-transcriptionally. Regulatory sequences have been identified that control their temporal and spatial expression and determine seed and tissue specificity, and more than one regulatory region (promoter) in the storage protein genes is thought to be involved in such regulation by specific DNA-binding proteins (Buchanan et al., 2002). The prolamin OsRP5 was found to interact with OsMADS6 and with another transcriptional regulator (not included in this Example). It is possible that these interactions represent steps in the transcriptional regulation of prolamin expression associated with seed development. Alternatively, the MADS box protein can be sequestered through the interaction with prolamin to be stored with storage proteins that will be used upon seed germination. In either case, this interaction signifies a previously unreported role for OsMADS6 in seed development, in addition to flower development.

[0689] It is likely that the coiled coil(s)/K-box identified in the MADS box proteins of this Example facilitate the MADS box protein interactions. Our amino acid sequence alignment analysis of the regions encoded by the interacting clones indicates that all clones share a highly conserved MADS domain, a less conserved K box, and the more variable I region (directly downstream of the MADS domain) and C-terminal domain, in accordance with the modular structure reported in the literature for MADS box proteins (Moon et al., 1999; Lim et al., 2000). The alignments are shown in FIGS. 3A-3D. This analysis also determined that all interacting fragments include at least the K box, suggesting that this domain is responsible for dimerization, as reported previously. Furthermore, from these alignments a phylogenetic tree was constructed to illustrate the relationships among the interacting proteins (shown in FIG. 3E). Based on previous reports (Moon et al., 1999), the tree indicated that OsMADS45, OsMADS7, OsMADS8, OsMADS1 and OsMADS5 are members of the AGL2 subfamily; OsMADS6 and OsMADS17 belong to the AGL6 subfamily; OsFDRMADS6, OsMADS14, RAP1B, OsMADS15, OsMADS18 and novel protein OsPN29949 belong to the SQUA subfamily, all these subfamilies comprised in the AP1/AGL9 family of MADS box genes. The remaining interactors—OsMADS13, OsMADS3, OsFDRMADS8, OsBAA81880, and Os008339—are classified as others.

[0690] MADS box genes isolated from several plant species are known to play important roles in plant development, especially flower development. Knowledge of genes that regulate developmental processes such as flower and fruit development and flowering time has important applications in agriculture, providing new approaches to control of flower and fruit yield. For example, a mutant MADS-box gene, the apple PI homolog (MdPI) of the Arabidopsis mutant PI (which causes apetaly) abolishes the normal expression of the MdPI gene, resulting in parthenocarpic fruit (fruit without seed) development in some apple varieties (Yao et al., 2001). Parthenocarpic fruit develops without pollination or fertilization and has a higher commercial value than its seed-bearing counterpart. The identification of the MdPI sequence has led to the proposal of genetic engineering methods to produce parthenocarpic fruit cultivars.

[0691] As one of the major human staples, rice has been a target of genetic engineering for higher yields and resistance to diseases, pests, and environmental stresses of various kinds. The proteins encoded by MADS genes regulate transcription of genes associated with developmental processes such as floral organ identity, flowering time, and fruit development. The interactions between rice MADS box transcription factors identified in this Example are relevant to agriculture. Modulation of these interactions can be exploited for the development of genetically engineered plants characterized by a modulated flower development. Because rice is a model for other cereals, knowledge of the genetic mechanisms controlling development in rice will lead to opportunities for enhanced food crops.

[0692] The timing of the transition from vegetative growth to flowering, for example, is one of the most important steps in plant development. This step determines the quality and quantity of most crop species by affecting the balance between vegetative and reproductive growth. Therefore, control of flowering time in genetically engineered cereal crops is important in agriculture. One genetic modification that would be economically desirable would be to accelerate the flowering time of a plant. Induction of flowering is often the limiting factor for growing crop plants. One of the most important factors controlling induction of flowering is day length, which varies seasonally as well as geographically. There is a need to develop methods for controlling and inducing flowering in plants, regardless of the locale or the environmental conditions, thereby allowing production of crops, at any given time. Since most crop products (e.g., seeds, grains, fruits), are derived from flowers, such a method for controlling flowering would be economically invaluable. A gene that modulates flowering time in plants was identified and its use proposed for the production of genetically modified plants in which overexpression of this gene results in early flowering in Arabidopsis, while loss of function mutations in or antisense directed to the gene cause late flowering (see U.S. Patent Application No. 20010049831). Isolated nucleic acids and methods related to the OsMADS1, OsMADS5, OsMADS6, OsMADS7, and OsMADS8 genes of Oryza sativa and the NtMADS3 gene of Nicotiana tabacum have also been provided whose expression in transgenic plants causes an altered phenotype, including phenotypes related to the timing of the transition between vegetative and reproductive growth (e.g., diminished apical dominance, early flowering, a partially or completely altered daylength requirement for flowering, greater synchronization of flowering, or a relaxed vernalization requirement; see U.S. Pat. No. 5,990,386). Modulation of the protein interactions identified in this Example for OsMADS1, OsMADS5, OsMADS6, OsMADS7, and OsMADS8, for example, could lead to control of flower induction in cereal crops. Additionally, modulation of plant development could be achieved through the identification and application of compounds that can affect the activity of the proteins or the expression of the genes provided in this Example.

[0693] In another potential application, the plant-specific K-box domain present in MADS box proteins could be exploited for the development of compounds that increase the quantity or quality of fruit production but do not affect humans or livestock. Additionally, because the K-box domain is the region of the MADS box proteins that confers protein-binding specificity, these domains, either as parts or whole, can be targets for genetic modification aimed at manipulating traits conferred by specific MADS box protein-protein interactions.

### Example IV

[0694] Plant development can also be affected by proteins containing homeobox domains. As reviewed by Gehring, 1992, such homeobox domain containng proteins are DNA-binding transcriptional regulators, many of which are involved in developmental processes. Such proteins have been identified in plants (see e.g., Ruberti et al., 1991; Vollbrecht et al., 1.991). Homeobox genes are characterized by the presence within each gene of a well-conserved sequence, the homeobox, which encodes a 61-amino acid DNA-binding domain called the homeodomain. The homeodomain-containing proteins encoded by the homeobox genes are thus capable of binding to specific DNA sequences and act as transcription factors that control the expression of downstream genes to regulate development. In higher plants, homeodomain proteins are mainly implicated in organogenesis or developmental processes (see references below), and also in the pathogenesis-related defense response (Korfhage et al., 1994). The target genes directly regulated by homeodomain-containing proteins are however still largely unidentified (Mannervick, 1999).

[0695] Plant homeobox genes (reviewed in Chan et al., 1998) can be subdivided into different families (Hd-Zip, Glabra, Knotted, PHD finger, Bell, Zmbox-PHD) according to sequence conservation within the homeodomain and the presence of additional sequences. Homeobox genes of the plant-specific knotted-like homeobox (KNOX) class contain a conserved domain, the KNOX domain, upstream of the homeodomain. The plant KNOX genes belong to the TALE superclass of homeobox genes, which also comprises genes identified in animals and fungi (Burglin et al., 1997). KNOX genes have been identified in numerous plants, both monocots such as rice and maize, and dicots such as Arabidopsis and tomato; they are normally expressed in the meristem and are thought to be primarily involved in shoot and leaf development, particularly in the control of cell fate determination in the shoot meristem (Chan et al., 1998). The first identified plant homeobox gene, the knotted1 (kn1; Vollbrecht et al., 1991) isolated from maize, provided evidence that plant homeobox genes, similar to those of animals, play an important role in regulating developmental processes. Ectopic expression of the maize kn1 gene (and related dicot genes) often leads to the organization of new meristems in dicot leaves but usually not in monocot leaves (Sinha et al., 1993; Lincoln et al., 1994; Hake et al., 1995; Muller et al., 1995; Haraven et al., 1996; Williams-Carrier et al., 1997). Loss-of-function mutations in the maize kn1 gene result in defects in shoot meristem maintenance (Kerstetter et al., 1997). Kn1 belongs to the plant-specific KNOX class of homeobox genes. Other KNOX genes identified in maize include rough sheath1 (rs1) and liguleless3 (Lg3) (reviewed in Chan et al., 1998; Muehlbauer et al, 1999), which are thought to be involved in lateral organ development and specifically, in retarding the acquisition of terminal regional identity.

[0696] On the basis of sequence homology and expression pattern, KNOX genes are grouped into two classes, I and II (Kerstetter et al., 1997; Chan et al., 1998). Class I genes are mainly expressed in vegetative and inflorescence meristems and are involved in the regulation of shoot apical meristem formation and function and in leaf and flower morphology. The less characterized class II KNOX genes are expressed in most plant organs and tissues and not in meristematic tissues, and they are thought to regulate later stages of development. Further, all class I genes analyzed give rise to similar and distinct phenotypic effects, such as perturbations in the development of leaves leading to morphological defects, when ectopically expressed in transgenic plants. For example, the maize mutant rough sheath2 (rs2) displays ectopic expression of at least three KNOX genes and consequently conditions a range of shoot and leaf phenotypes, including aberrant vascular development, ligular displacements, and dwarfism (Schneeberger et al., 1998). These studies suggest that down-regulation of KNOX gene expression is essential for normal leaf initiation and development. By contrast, no developmental defects have been recorded in plants expressing a class II gene ectopically.

[0697] Protein-protein interactions can contribute to the functioning of KNOX proteins, as demonstrated by the ability of two rice KNOX class I proteins to form homo- and heterodimers (Postma-Haarsma et al., 2002). Besides the homeodomain, KNOX proteins contain the conserved ELK and KNOX domains, the latter containing a putative helical structure that suggests a function in protein-protein interaction (Postma-Haarsma et al., 2002). In light of the importance of homeobox genes in controlling plant development, the interaction studies presented here are aimed at characterizing the rice homeobox protein OsHOS59, a member of the class II KNOX genes, which is not described in the literature. The identification of genes encoding proteins that participate in homeobox regulation in rice can allow genetic manipulation of crops to effect agronomically desirable changes in plant growth or development.

[0698] This Example provides newly characterized rice proteins interacting with the rice homeobox protein HOS59 (OsHOS59). An automated, high-throughput yeast two-hybrid assay technology was used (provided by Myriad Genetics Inc., Salt Lake City, Utah, United States of America) to search for protein interactions with the bait protein OsHOS59.

Results

[0699] OsHOS59 was found to interact with five proteins annotated in the public domain: a hypothetical protein found similar to GTPase activating protein (OsAAD27557); a putative myosin (OsAAG13633); a putative homeodomain protein (OsAAK00972); putative eukaryotic translation initiation factor 3 large subunit; and the rice probable Myb factor. Seven additional interactors for OsHOS59 are novel rice proteins: a heat shock-like protein (Os000221-3976); a protein similar to the rubber tree latex-abundant protein (OsPN23251); a putative S-adenosyl-L-homocysteine hydrolase (OsPN23829), an enzyme with a role in the control of methylation; a putative PHD-finger protein (OsPN23830); a myosin (OsPN24092) similar to the myosin protein OsAAG13633 described above; and two proteins of unknown function (OsPN23388 and OsPN30858). Additional interactors were identified for some of the prey proteins.

[0700] The interacting proteins of the Example are listed in Table 15, followed by detailed information on each protein and a discussion of the significance of the interactions. The nucleotide and amino acid sequences of the proteins of the Example are provided in SEQ ID NOs: 67-80 and 257-268.

[0701] Some of the proteins identified represent rice proteins previously uncharacterized. Based on their presumed biological function and on the ability of the prey proteins to specifically interact with the bait protein OsHOS59, the interacting proteins are speculated to be associated with developmental processes in rice.

TABLE 15
Interacting Proteins Identified for HOS59
(Homeobox Protein HOS59, Fragment)
The names of the clones of the proteins used as baits and found as preys are given.
Nucleotide/protein sequence accession numbers for the proteins of the Example (or related
proteins) are shown in parentheses under the protein name. The bait and prey coordinates
(Coord) are the amino acids encoded by the bait fragment(s) used in the search and by the
interacting prey clone(s), respectively. The source is the library from which each prey clone
was retrieved.

| | | | |
|---|---|---|---|
| | Protein Name | | Prey Coord |
| Gene Name | (GENBANK ® Accession No.) | Bait Coord | (source) |

BAIT PROTEIN

| | |
|---|---|
| OsHOS59 | O. sativa Homeobox Protein HOS59, |
| PN20559 | Fragment (BAB55659.1) |
| (SEQ ID NO: 258) | |

INTERACTORS

| | | | |
|---|---|---|---|
| OsAAD27557* | O. sativa Hypothetical Protein, Similar | 1-100 | 7-142 |
| PN22896 | to GTPase Activating Protein | | (input trait) |
| (SEQ ID NO: 260) | (AF111710; AAD27557) | | |
| OsAAG13633# | O. sativa Putative Myosin | 1-100 | 799-951 |
| PN25701 | (AC078840; AAG13633) | | (output trait) |
| (SEQ ID NO: 262) | | | |
| OsAAK00972 | O. sativa Putative Homeodomain | 1-100 | 236-350 |
| PN23253 | Protein OsAAK00972 | | (output trait) |
| (SEQ ID NO: 264) | (AC079736; AAK00972.1) | | |
| OsBAB07943 | O. sativa Putative Eukaryotic | 1-100 | 525-767 |
| PN23832 | Translation Initiation Factor 3 Large | | (output trait) |
| (SEQ ID NO: 266) | Subunit | | |
| | (AP002487; BAB07943.1) | | |
| OsMYB | O. sativa Probable Myb Factor | 1-100 | 36-129 (output |
| PN20689 | (T03830) | | trait) |
| (SEQ ID NO: 268) | | | |
| Os000221-3976& | Hypothetical Protein 000221-3976, | 1-100 | 2x 123-238 |
| PN23169 | Fragment, Similar to OsHP82 | | (input trait) |
| (SEQ ID NO: 68) | (P33126; e = 0.0) | | |
| OsPN23251 | Novel Protein PN23251 | 1-206 | 112-291 |
| (SEQ ID NO: 70) | | | (input trait) |
| OsPN23388 | Novel Protein PN23388 | 1-100 | 229-331 |
| (SEQ ID NO: 72) | | | (output trait) |
| OsPN23829@ | Novel Protein PN23829 Putative S- | 1-100 | 3x 2-226 |
| (SEQ ID NO: 74) | Adenosyl-L-Homocysteine Hydrolase | | (output trait) |
| | (P32112; e = 0.0) | 1-206 | 3x 1-247 |
| | | | (output trait) |
| OsPN23830! | Novel Protein PN23830, Similar to A. thaliana | 1-100 | 4-207 |
| (SEQ ID NO: 76) | Putative PHD-Finger Protein | | 2x 1-169 |
| | (NP_566742.1; 2e⁻⁷³) | | (output trait) |
| OsPN24092 | Novel Protein PN24092, Similar to O. sativa | 1-100 | 797-948 |
| (SEQ ID NO: 78) | Putative Myosin | | (output trait) |
| OsPN30858 | Novel Protein PN30858 | 1-206 | 230-400 |
| (SEQ ID NO: 80) | | | (output trait) |

*Additional interactions identified for OsAAD27557 are shown in Table 16
#Additional interactions identified for OsAAG13633 are shown in Table 17
&Additional interactions identified for Os000221-3976 are shown in Table 18
@Additional interactions identified for OsPN23829 are shown in Table 19
!Additional interactions identified for OsPN23830 are shown in Table 20

[0702] TABLE 16
Interacting Proteins Identified for AAD27557
(Hypothetical Protein Similar to GTPase Activating Protein)

| | | | |
|---|---|---|---|
| | Protein Name | | |
| | (GENBANK ® | Bait | Prey Coord |
| Gene Name | Accession No.) | Coord | (source) |

PREY PROTEIN

| | |
|---|---|
| OsAAD27557 | Hypothetical Protein |
| PN22896 | Similar to GTPase |
| (SEQ ID NO: 260) | Activating Protein |
| | (AF111710; AAD27557) |

BAIT PROTEIN

| | | | |
|---|---|---|---|
| Os003181-3684 | Hypothetical Protein | 58-140 | 1-149 |
| PN21036 | 003181-3684 | | (output trait) |
| (SEQ ID NO: 82) | | | |

[0703] TABLE 17
Interacting Proteins Identified for AAG13633
(Putative Myosin)

| | | | |
|---|---|---|---|
| | Protein Name | | |
| | (GENBANK ® | Bait | Prey Coord |
| Gene Name | Accession No.) | Coord | (source) |

PREY PROTEIN

| | |
|---|---|
| OsAAG13633 | O. sativa Putative Myosin |
| PN25701 | (AC078840; AAG13633) |
| (SEQ ID NO: 262) | |

BAIT PROTEIN

| | | | |
|---|---|---|---|
| Os005750-3115 | O. sativa bZIP | 50-150 | 2x 528-789 |
| PN20466 | Transcription Factor | | 538-738 |
| (SEQ ID NO: 270) | (AB051294; BAB72061.1) | | 612-738 |
| | | | (output trait) |

[0704] TABLE 18
Interacting Proteins Identified for 000221-3976
(Hypothetical Protein 000221-3976, Fragment)

| | | | |
|---|---|---|---|
| | Protein Name | | |
| | (GENBANK ® | Bait | Prey Coord |
| Gene Name | Accession No.) | Coord | (source) |

PREY PROTEIN

| | |
|---|---|
| 0s000221-3976 | Hypothetical Protein |
| PN30899 | 000221-3976, |
| (SEQ ID NO: 24) | Fragment, Similar to |
| | OsHP82 (P33126; e = 0.0) |

BAIT PROTEIN

| | | | |
|---|---|---|---|
| OsCYCOS2 | Oryza sativa Cyclin 2 | 50-233 | 163-313 |
| PN20257 | (X82036; CAA57556) | | (input trait) |
| (SEQ ID NO: 210) | | | |

[0705] TABLE 19
Interacting Proteins Identified for PN23829
(Novel Protein PN23829 Putative S-Adenosyl-L-Homocysteine Hydrolase)

| | | | |
|---|---|---|---|
| | Protein Name | | Prey Coord |
| Gene Name | (GENBANK ® Accession No.) | Bait Coord | (source) |

PREY PROTEIN

| | |
|---|---|
| OsPN23829 | Novel Protein PN23829 Putative S- |
| (SEQ ID NO: 74) | Adenosyl-L-Homocysteine Hydrolase |
| | (P32112; e = 0.0) |

BAIT PROTEIN

| | | | |
|---|---|---|---|
| OsTFX1 | O. sativa Putative Transcription | 400-629 | −21-216 |
| PN19697 | Factor X1 (AF101045; AAF21887) | | −4-226 |
| (SEQ ID NO: 272) | | | −2-195 |
| | | | (output trait) |
| Os005792-3529 | Hypothetical Protein 005792-3529 | 1-55 | 3-220 |
| PN20080 | Similar to O. sativa Receptor Kinase | | (output trait) |
| (SEQ ID NO: 274) | (AAK18840.1; 8e⁻⁰⁷) | | |

[0706] TABLE 20
Interacting Proteins Identified for PN23830
(Similar to A. thaliana Putative PHD-Finger Protein)

| | | | |
|---|---|---|---|
| | Protein Name | | Prey |
| | (GENBANK ® | Bait | Coord |
| Gene Name | Accession No.) | Coord | (source) |

PREY PROTEIN

| | |
|---|---|
| OsPN23830 | Novel Protein PN23830, |
| | Similar to A. thaliana |
| (SEQ ID NO: 76) | Putative PHD-Finger Protein |
| | (NP_566742.1; 2e⁻⁷³) |

BAIT PROTEIN

| | | | |
|---|---|---|---|
| Os018049-3655 | Hypothetical Protein | 1-148 | 89-250 |
| PN20534 | 018049-3655, Fragment, | | (output |
| (SEQ ID NO: 176) | O. sativa Putative | | trait) |
| | Homeodomain | | |
| | Transcription Factor, | | |
| | 3′-Partial | | |
| | (AC092697; AAL58126.1) | | |

Two-Hybrid Assay Using OsHOS59 as Bait

[0707] OsHOS59 is a 205-amino acid protein fragment with a homeobox domain profile (Gehring, 1992; Gehring & Hiromi, 1986; Schofield, 1987), namely at amino acids 122 to 185, as determined by analysis of its amino acid sequence. Proteins within this group are DNA-binding transcriptional regulators that are involved in developmental processes. A BLAST analysis of the amino acid sequence indicated OsHOS59 is the rice KNOX Family Class II Homeodomain Protein (GENBANK® Accession No. BAB55659.1). The analysis indicated that all proteins displaying close homology to OsHOS59 are also homeodomain proteins, particularly from plant species. This strongly suggests that OsHOS59, although not described in the literature, is a rice homeobox protein that most likely functions as do other members of this protein family.

[0708] There is not much evidence on the role of class II KNOX genes. However, based on studies with the class II gene KNAT3 from Arabidopsis, which was found to be expressed in young leaves, buds and pedicels, at the junction between organs and in maturing tissues, and whose expression is regulated by light, class II KNOX genes are suggested to be involved in later stages of plant development (discussed in Chan et al., 1998).

[0709] Two bait fragments, encoding amino acid 1-100 and 1-206, of OsHOS59 were used in the yeast two-hybrid screen.

[0710] A BLAST analysis comparing the nucleotide sequence of OsHOS59 against TMRI's GENECHIP® Rice Genome Array sequence database identified probeset OS011682_at and OS002989.1_i_at (e⁻¹⁰⁰ and 7e⁻²⁶ expectation values, respectively) as the closest matches. Analysis of gene expression in rice plants indicated that this gene is down-regulated by environmental cold, and by abscisic acid and jasmonic acid.

[0711] OsHOS59 was found to interact with OsAAD27557. OsAAD27557 is annotated as a rice Hypothetical Protein (GENBANK® Accession No. AAD27557). It is a 789-amino acid protein with a leucine-rich repeat between amino acids 214 and 241, as determined by analysis of its amino acid sequence (1.28e⁻⁰³ prediction value). Leucine-rich repeats are thought to be involved in protein-protein interactions (Kobe et al., 1994). A BLAST analysis against the public database indicated that the amino acid sequence of OsAAD27557 is similar to those of Ran GTPase activating protein from the plant Medicago sativa subsp. x varia (GENBANK®) Accession No. AAF19528.1, 66.4% identity, e=0.0) and GTPase activating protein 2 from A. thaliana (GENBANK® Accession No. NP_{—}197433, 62% identity, e⁻¹⁷⁹). In agreement with these results, a BLAST analysis against Myriad's proprietary database indicated human Ran GTPase activating protein 1 (RANGAP1) as the most similar protein to OsAAD27557 (28% identity, 5e⁻²⁴). GTPase activating proteins interact with GTPases such as Ras thereby enhancing the GTPase activity (Bischoff et al., 1994). Hydrolysis of GTP to GDP is an important step in many intracellular signal transduction pathways that control various cellular processes such as cell growth and development, apoptosis, lipid metabolism, cytoarchitecture, membrane trafficking, and transcriptional regulation (Aznar & Lacal, 2001). Ran GTPases are required for nucleo-cytoplasmic transport, regulation of cell cycle progression, mitotic spindle formation, and postmitotic nuclear assembly (reviewed by Sazer & Dasso, 2000, and Dasso, 2000). Plants Ran proteins are thought to be functionally equivalent to their mammalian and yeast homologs and to be necessary for maintaining a coordinated cell cycle, for protein import into the nucleus and for the onset of mitosis (Ach & Gruissem, 1997; Merkle et al., 1994). Moreover, plant small GTP-binding proteins have been linked to disease resistance (Ono et al., 2001). Thus, the prey protein OsAAD27557 is a rice GTPase activating protein that likely participates in signal transduction involving GTP hydrolysis during events related to cell division as part of either plant development and/or response to pathogen invasion.

[0712] OsAAD27557 also interacts with Hypothetical Protein 003181-3684 (Os003181-3684; see Table 16). Os003181-3684 is a hypothetical protein of 176 amino acids that includes a predicted transmembrane domain (amino acids 43 to 59). A BLAST analysis of the amino acid sequence indicated no proteins highly similar to Os003181-3684 in either public or Myriad's proprietary databases. However, the predicted transmembrane domain suggests that this protein can be some type of cell surface receptor or receptor-interacting protein that is important for signal transduction. The OsAAD27557-Os0031813684 interaction can represent a step in a signal transduction pathway involving GTP hydrolysis and transcriptional regulation in developmental processes.

[0713] OsHOS59 was also found to interact with O. sativa putative myosin (OsAAG13633). A BLAST analysis of the amino acid sequence of OsAAG13633 indicated that this prey protein is the rice putative myosin (GENBANK® Accession No. AAG13633, 100% identity, e=0.0). Myosins are discussed in Example I. Based on current knowledge of plant myosins, the prey protein OsAAG13633 can be a cytoskeletal component that participates in events relating to cytoplasmic streaming or cell division during plant development.

[0714] OsAAG13633 also interacts with O. sativa bZIP Transcription Factor (Os005750-3115; see Table 17). Os005750-3115 is a 333-amino acid protein with a predicted basic leucine zipper (bZIP) domain (amino acids 45 to 108, 1.54e⁻⁶; see Hurst, 1995; Ellenberger, 1994). This domain includes a basic DNA-binding region and a leucine zipper used to initiate protein-protein interactions, and it is often found in transcription factors. A BLAST analysis of the amino acid sequence of Os005750-3115 indicated that this protein is the rice bZIP Transcription Factor (GENBANK® Accession No. BAB72061.1, 99.3% identity, e=0.0).

[0715] OsHOS59 was also found to interact with OsAAK00972, a 642-amino acid protein that includes a homeobox domain profile (amino acids 379 to 442 by Prosite, amino acids 406 to 441 by Pfam), as determined by analysis of its amino acid sequence. The analysis also identified a POX domain (a domain associated with HOX domains) between amino acids 188 and 333 (1.36e⁻⁵⁶). The retrieved prey clone encodes amino acids 236 to 350 of OsAAK00972, a region that includes the POX domain of OsAAK00972. Hox genes are clustered sets of homeobox-containing genes that play a central role in animal development (Mann & Affolter, 1998). A BLAST analysis of the amino acid sequence of OsAAK00972 indicated that it is the rice Putative Homeodomain Protein (GENBANK®) Accession No. AAK00972.1, 100% identity, e=0.0). OsAAK00972 is thus a member of the homeobox protein family.

[0716] OsHOS59 was also found to interact with OsBAB07943, a protein of 984 amino acids with a predicted transmembrane domain (amino acids 316 to 332). Analysis of its sequence also identified a PINT (Proteasome, Int-6, Nip-1 and TRIP-15) motif (amino acids 441 to 532, 3.91e⁻⁰⁷), which is present in the C-terminal region of several regulatory components of the 26S proteasome and other proteins. The function of this motif is not known. The analysis also predicted three coiled coils (amino acids 91 to 123, 552 to 700, and 794 to 963). The prey clone retrieved encodes amino acids 525 to 767 of OsBAB07943, a region that includes one of the predicted coiled coils within OsBAB07943. The presence of the PINT motif is in agreement with the results of BLAST analysis, which indicated that OsBAB07943 is the rice putative eukaryotic translation initiation factor 3 (eIF3) large subunit (GENBANK® Accession No. BAB07943.1, 100% identity, e=0.0), eIF3e being homologous to the product of Int-6 (eIF3e; Shalev et al., 2001). The analysis also indicated that OsBAB07943 is similar to eukaryotic translation initiation complexes of other species including Zea mays (GENBANK® Accession No. AAD39834, 69% identity, e=0.0) and Nicotiana tabacum (GENBANK® Accession No. Q40554, 66% identity, e=0.0). Therefore, it is likely that OsBAB07943 truly is a rice translation initiation factor subunit.

[0717] The mammalian eukaryotic initiation factor 3 (eIF3) is composed of at least eight subunits, the largest of which has a relative molecular mass of 180 kDa. A comparison of the sequences of the corresponding eIF3 large subunits from several species led to the conclusion that eIF3 large subunit is highly conserved across the animal, plant, and fungal kingdoms (Johnson et al., 1997). In Z. mays, eukaryotic translation initiation factor 3 large subunit is expressed in the region of the root meristem surrounding the central stele and in the young root, the male inflorescence, and the developing cob and seed (Sabelli et al., 1999). Eukaryotic initiation factor complexes initiate translation of mRNA (reviewed by Hannig et al., 1995), in part by using their helicase activity to unwind the mRNA strand secondary structure in the 5′-untranslated region of mRNA, which facilitates binding of the mRNA to the 40 S ribosomal subunit (Rogers et al., 2001). In addition, eIF3 in humans is in some circumstances regulated by protein-protein interaction (Guo et al., 2000).

[0718] OsHOS59 was also found to interact with O. sativa Myb factor (OsMYB). A BLAST analysis of the amino acid sequence of OsMYB indicated that this prey protein is the rice Probable Myb Factor (GENBANK® Accession No. T03830, 100% identity, e⁻¹⁶⁸). OsMYB is a protein of 279 amino acids that includes an ATP/GTP-binding site motif A (P-loop, amino acids 45 to 52 (see e.g., Saraste et al., 1990; Koonin, 1993) and two Myb DNA-binding domain repeats (amino acids 17 to 25 for signature 1, and amino acids 89 to 112 for signature 2; see e.g., Grotewold et al., 1991; Oppenheimer et al., 1991). The prey clone retrieved encodes amino acids 36 to 129 of OsMYB, a region that includes the P-loop and the Myb DNA-binding domain signature 2. Myb proteins are nuclear DNA-binding proteins that recognize the sequence pyAAC(G/T)G (Biedenkapp et al., 1988). The presence of two Myb DNA-binding signatures suggests that OsMYB is a member of the two-repeat family of Myb proteins. The number of these repeats determines how the protein binds DNA and, consequently, its function (reviewed by by Jin & Martin, 1999).

[0719] OsHOS59 was also found to interact with Os000221-3976, a 480-amino acid protein fragment that includes an Hsp90 domain (amino acids 6 to 480), as determined by analysis of its amino acid sequence (e=0.0). A BLAST analysis against the public and Myriad's proprietary databases showed that Os000221-3976 shares amino acid sequence similarity with many heat shock proteins, the top hit being the rice heat shock protein 82 (Van Breusegem et al., 1994; GENBANK® Accession No. P33126, 96.4% identity, e=0.0). Therefore, Os000221-3976 is either a splice variant of heat shock protein 82 or a separate but very similar protein. A comparison of the nucleotide sequences suggests the latter is more likely. The rice HSP82 mRNA is induced specifically upon heat stress (Van Breusegem et al., 1994).

[0720] While heat shock proteins (HSPs) have been ascribed a main role in the plant stress response, some of these proteins are designated as HSPs solely based on sequence homology and their functions in plants have not been demonstrated in vitro. Indeed, some HSPs are expressed throughout development. HSPs function as molecular chaperones that promote proper protein folding and can have roles not related to the stress response. HSP70 proteins, for instance, are essential for normal cell function. They are ATP-dependent molecular chaperones that can interact with many different proteins, given their role in protein folding, unfolding, assembly, and disassembly. These topics are discussed in Buchanan et al., 2002 at pages 1197-1202. The heat shock protein HSP70 in sea urchin cells has been proposed to have a chaperone role in tubulin folding when localized on centrosomes, and in the assembling and disassembling of the mitotic apparatus when localized on the fibres of spindles and asters (Agueli et al., 2001).

[0721] The heat shock protein Os000221-3976 also interacts with rice Cyclin 2 (OsCYCOS2; see Table 18). The 419-amino acid protein OsCYCOS2 (GENBANK® Accession No. CAA57556) is a G2/M type cyclin that contains two cyclin domains spanning amino acids 200 to 284 (2.7e⁻²⁶) and amino acids 297 to 379 (1.29e⁻²²). Type G2/M cyclins regulate the cell cycle progression from G2 to mitosis during plant development. Cyclins are regulatory proteins that activate cyclin-dependent protein kinases (CDKs), which are essential for cell cycle progression in eukaryotes. The binding of cyclins to specific proteins is thought to provide potential substrates to CDKs. Cyclins are thus important regulators that couple control of proliferation to the many environmental and developmental cues that affect plant growth. (The role of cyclin-CDK complexes in regulation of the plant cell cycle is reviewed in John et al., 2001 and Potuschak & Doerner, 2001. Interactions identified for OsCYCOS2 are discussed in Example II above.)

[0722] OsHOS59 was also found to interact with OsPN23251, a novel 420-amino acid protein with a possible cleavage site between amino acids 19 and 20, although no N-terminal signal peptide is evident. A BLAST analysis of the OsPN23251 amino acid sequence determined that it is similar to latex-abundant protein from the rubber tree Hevea brasiliensis (GENBANK® Accession No. AAD13216.1, 62% identity, e⁻¹⁴¹). Many proteins isolated from latex are defense-related allergens (Kostyal et al., 1998). A BLAST analysis comparing the nucleotide sequence of OsPN23251 against TMRI's GENECHIP® Rice Genome Array sequence database identified probeset Os004430.1_at (e=0.0 expectation value) as the closest match. Analysis of gene expression indicated that this gene is specifically expressed in root.

[0723] OsHOS59 was also found to interact with novel protein OsPN23388. OsPN23388 is a 509-amino acid protein with a predicted BRCA1 C-terminus (BRCT) domain (amino acids 1 to 42, 5.2e⁻⁰⁵), which is known to facilitate protein-protein interactions. This domain was originally identified in the breast/ovarian cancer suppression protein, BRCA1, and is found in a large number of proteins involved in DNA repair, recombination, and cell cycle control (Zhang et al., 1998). These include p53-binding protein (53BP1) and two uncharacterized hypothetical proteins (KIAA0170 and SPAC19G10.7) (Callebaut & Mornon, 1997). A BLAST analysis against the Genpept database indicated that OsPN23388 is similar to two A. thaliana proteins of unknown function: hypothetical protein (GENBANK® Accession No. NP_{—}180195, 49.3% identity, e⁻¹¹⁴) and hypothetical protein T15B3.70 (GENBANK® Accession No. T48947, 44% identity, e⁻⁷²).

[0724] OsHOS59 was also found to interact with OsPN23829, a protein of 485 amino acids. An analysis of its amino acid sequence identified an S-adenosyl-L-homocystein hydrolase signature 1 (amino acids 85 to 99) and an S-adenosyl-L-homocystein hydrolase signature 2 (amino acids 262 to 278) (see Sganga et al., 1992). In agreement with the presence of these protein signatures, a BLAST analysis against the Genpept database indicated that the amino acid sequence of OsPN23829 is similar to those of S-adenosyl-L-homocysteine hydrolase proteins from several other species including Triticum aestivum (top hit, GENBANK® Accession No. P32112, 95.2% identity, e=0.0), asparagus (GENBANK® Accession No. CAA03454, 90% identity, e=0.0), and Catharanthus roseus (GENBANK® Accession No. S38379, 90% identity, e=0.0). In agreement with these results, the most similar protein in Myriad's proprietary database is Triticum aestivum S-adenosyl-L-homocysteine hydrolase (92% identity, e=0.0).

[0725] S-adenosyl-L-homocysteine hydrolase is a key enzyme in the activated methyl cycle, which involves the production of S-adenosyl-methionine (reviewed in Kawalleck et al., 1992), whose fate is important for protein synthesis or DNA modification. This enzyme hydrolyzes S-adenosyl-L-homocysteine into adenosine and L-homocysteine (a reaction that requires NAD as a cofactor) and thus plays a crucial role in normal cellular metabolism. Because S-adenosyl-L-homocysteine is a competitive inhibitor of S-adenosyl-L-methionine-dependent methyl transferase reactions, S-adenosyl-L-homocysteine hydrolase is though to play a key role in the control of methylation via regulation of the intracellular concentration of S-adenosyl-L-homocysteine. Transmethylation reactions are important components of the biosynthetic machinery in most plant cells. The regulation of intracellular methylation reactions mediated by S-adenosyl-L-homocysteine hydrolase has been linked to morphogenesis in planta. Deregulation of methylation resulted in morphological changes including a floral homeotic change in transgenic tobacco expressing antisense RNA of the S-adenosyl-L-homocysteine hydrolase gene (Tanaka et al., 1997). In addition, a role for S-adenosyl-L-homocysteine hydrolase in the plant pathogen-induced defense response has been suggested based on the observation that elicitor treatment induces both S-adenosyl-L-homocysteine hydrolase mRNA expression and activity in parsley cultured cells and in intact leaves (Kawalleck et al., 1992). In a contrasting role, S-adenosyl-L-homocysteine hydrolase activity can be involved in mechanisms leading to viral infection, as the effectiveness of antiviral compounds correlates with their ability to inhibit its activity (Robins et al., 1998; Liu et al., 1992; Wolf & Borchardt, 1991; Kitade et al., 1999).

[0726] A BLAST analysis comparing the nucleotide sequence of OsPN23829 against TMRI's GENECHIP® Rice Genome Array sequence database identified probeset Os001768.1_at (e=0.0) expectation value) as the closest match. Analysis of gene expression indicated that this gene is induced by jasmonic acid and by Magnaporthe grisea, the fungal pathogen that causes rice blast disease.

[0727] OsPN23829 also interacts with rice putative transcription factor X1 (OsTFX1; GENBANK® Accession No. AAF21887.1), and with hypothetical protein 005792-3529 (Os005792-3529; see Table 19). OsTFX1 is an uncharacterized transcription factor. It can form a complex with both OsPN23829 and OsHOS59 to regulate transcriptional events related to cell cycle/development. Os005792-3529 is a hypothetical protein of 54 amino acids in which no well-characterized protein domain was identified. The isolated cDNA sequence starts with the putative ATG initiation codon, leaving the reading frame potentially open in the 5′ direction, suggesting that the real protein might be larger than 54 residues. BLAST analysis of the available amino acid sequence indicated that Os005792-3529 is similar to a putative receptor kinase from rice (GENBANK® Accession No. AAK18840.1, 72% identity, 8e⁻⁰⁷). Note, however, that the domain of similarity with the putative receptor kinase AAK18840.1 is only 36-residue long.

[0728] OsHOS59 was also found to interact with novel protein PN23830, which is similar to the putative Arabidopsis PHD-Finger protein OsPN23830. OsPN23830 is a protein of 253 amino acids. An analysis of its amino acid sequence identified a PHD domain (plant homeo domain, Pascual et al., 2000; Aasland et al., 1995; amino acids 199 to 246, e⁻¹⁰). The presence of the PHD finger domain is in agreement with BLAST analysis which indicated similarity of OsPN23830 to Arabidopsis putative PHD-finger protein (GENBANK® Accession No. NP_{—}566742.1, 53.8% identity, 2e⁻⁷³). The PHD finger is a Cys⁴-His-Cys³ zinc finger found primarily in a wide variety of chromatin-associated proteins, including HAT3.1, a plant homeobox gene (Aasland et al., 1995). Although the exact function of the PHD finger is not known, it is thought to facilitate protein-protein interactions (O'Connell et al., 2001). The association OsPN23830 with OsHOS59 suggests a role for OsPN23830 in transcriptional regulation during development.

[0729] OsPN23830 also interacts with another homeodomain protein, Hypothetical Protein 018049-3655 (Os018049-3655; see Table 20). A BLAST analysis of the amino acid sequence of Os018049-3655 determined that this protein is the rice Putative Homeodomain Transcription Factor, 3′-Partial (GENBANK® Accession No. AAL58126.1, 100% identity, 5e⁻¹³⁴).

[0730] OsHOS59 was also found to interact with novel protein PN24092. A BLAST analysis of the amino acid sequence of OsPN24092 determined that this protein is similar to the same rice putative myosin (GENBANK® Accession No. AAG13633, 84.7% identity, e=0.0) found to interact with OsHOS59 (see O. saliva Putative Myosin; OsAAG13633).

[0731] OsHOS59 was also found to interact with novel protein PN30858. A BLAST analysis of the amino acid sequence of OsPN30858 determined that this protein is similar to Expressed Protein from A. thaliana (GENBANK® Accession No. NP_{—}566372.1, 63.2% identity, e=0.0), a protein of unknown function.

Summary

[0732] The KNOX homeodomain protein OsHOS59 interacts with other DNA-binding proteins thought to be involved in transcriptional regulation, including a putative homeodomain protein (OsAAK00972) and a Myb protein (OsMYB). These interactions are consistent with published evidence that KNOX proteins function as homo- and heterodimers. Indeed, the specificity of KNOX proteins can be further enhanced by interactions with other transcription factors (Mann & Affolter, 1998; Postma-Haarsma et al., 2002). Based on the presumed role of OsHOS59 in plant development, we speculate that the OsHOS59-OsAAK00972 and OsHOS59-OsMYB interactions represent protein complexes that regulate transcription of genes involved in developmental processes and, in the case of OsMYB regulation, which include a specific sequence in their promoters. This hypothesis is supported by the observation that both HOX and Myb transcription factors cooperatively function to regulate myeloid cell differentiation in mammals (Nagamara-Inoue et al., 2001, and reviewed by Lenny et al., 1997).

[0733] OsHOS59 was also found to interact with a putative Ran GTPase activating protein (OsAAD27557). Given the function of Ran GTPases in nucleo-cytoplasmic transport, regulation of cell cycle progression, mitotic spindle formation, and postmitotic nuclear assembly Sazer & Dasso, 2000 and Dasso, 2000), the OsHOS59-OsAAD27557 interaction is speculated to represent a step in a signal transduction pathway that involves GTP hydrolysis during events related to cell cycle progression or cell division as part either plant development and/or response to pathogen invasion.

[0734] Two of the interactors identified in the yeast two-hybrid screen, OsAAG13633 and the novel protein OsPN24092, are putative myosins highly similar to each other (84.7% identity). Note that OsAAG13633 also interacts with another transcription factor (Os005750-3115). Molecular motors, including kinesins, myosins and dyneins, have been well characterized in non-plant organisms and implicated in a variety of cellular functions such as vesicle and organelle transport, cytoskeleton dynamics, morphogenesis, polarized growth, cell movements, spindle formation, chromosome movement, nuclear fusion, and signal transduction. In contrast, the roles of the many kinesins and myosins identified in plants are largely unknown (reviewed in Reddy, 2001). A few studies suggest that myosins in higher plants are involved in the movement of organelles and vesicles during cytoplasmic streaming and in pollen tube growth, and in maturation of the cell plate at cytokinesis (reviewed in Yokota et al., 1999b; Reichelt et al., 1999). The rice myosins identified in this Example are likely involved in dynamic cytoskeletal events, such as cytoplasmic streaming, intracellular cargo movement or cell division, associated with development processes. Their interactions with the transcription factors OsHOS59 and Os005750-3115 can represent steps in transcriptional regulation of such events.

[0735] Another interactor, Os000221-3976, is a putative heat shock protein similar to rice HSP82. Heat shock proteins (HSPs) act as molecular chaperones and, while these molecules in plants have been mainly linked to the stress response, some are not related to stress and their functions remain to be defined (Buchanan et al., 2002, at page 1198). Indeed, some HSPs are expressed throughout development. In the context of all the interactions identified for OsHOS59, it is possible that Os000221-3976 acts as a molecular glue to hold together interacting proteins or to promote proper protein folding in events related to plant development that might or might not be associated with stress. An alternative role for this prey protein can be deduced by functional homology with animal heat shock proteins whose chaperone roles in tubulin folding or mitotic structures assembly/disassembly depends on their localization on centrosomes or spindle fibers, respectively (Agueli et al., 2001). The heat shock protein Os000221-3976 can thus act as a chaperone in events related to tubulin folding or mitotic structure assembly/disassembly. These are functions associated with the phase of the cell cycle controlled by OsCYCOS2, a type G2/M cyclin that regulates the cell cycle progression from G2 to mitosis during plant development. The interaction identified in this Example between the heat shock protein Os000221-3976 and OsCYCOS2 substantiates this hypothesis and further supports the involvement of this novel rice heat shock protein in developmental processes. Discovery of the subcellular localization of Os000221-3976 can clarify its function.

[0736] Another protein interacting with OsHOS59 with a role in regulation of development is a putative S-adenosyl-L-homocysteine hydrolase (OsPN23829), an enzyme involved in control of methylation reactions. Transmethylation reactions are important components of the biosynthetic machinery in most plant cells. S-adenosyl-L-homocysteine hydrolase participates in the activated methyl cycle that yields methionine, whose fate is important for protein synthesis or DNA modification. In plants, the regulation of intracellular methylation reactions mediated by S-adenosyl-L-homocysteine hydrolase has been linked to morphogenesis through in planta studies. Deregulation of methylation results in morphological changes including a floral homeotic change in transgenic tobacco expressing antisense RNA of the S-adenosyl-L-homocysteine hydrolase gene (Tanaka et al., 1997). Our gene expression experiments indicate that OsPN23829 is induced by jasmonic acid which, in addition to having a role in the defense response, inhibits growth processes in many tissues and is active in reproductive development (it is thought to play some role in the formation of flowers, fruit, and seeds; Buchanan et al., 2002, at page 917). These data suggest that OsPN23829 can be involved in development/plant morphogenesis, and its association with the OsHOS59 can regulate transcriptional events related to these processes. In addition, a metabolic link can exist between the activated methyl cycle reactions mediated by S-adenosyl-L-homocysteine hydrolase and the plant pathogen-induced defense response (Kawalleck et al., 1992). While no other published evidence points to this conclusion, our gene expression experiments indicate that the gene encoding OsPN23829 is induced by jasmonic acid, which is also a component of plant defense response pathways, and by the fungal pathogen M. grisea. It is thus possible that the rice S-adenosyl-L-homocysteine hydrolase OsPN23829 can also have a role in defense against pathogens.

[0737] The remaining novel proteins found to interact with OsHOS59 include a eukaryotic translation initiation factor 3 large subunit (OsBAB07943) with a putative role in initiation of mRNA translation, a protein similar to latex-abundant protein (OsPN23251), and three proteins similar to Arabidopsis proteins of unknown function (OsPN23388, OsPN30858, and a putative PHD-finger protein OsPN23830). The association of these prey proteins with OsHOS59 suggests a role in transcriptional regulation of genes involved in development.

[0738] Many of the rice proteins found to interact with the KNOX homeodomain protein OsHOS59 have roles in plant cell cycle/development. This observation corroborates the notion that the previously uncharacterized protein OsHOS59 is involved in transcriptional regulation of development genes. Some of these interactors are newly characterized rice proteins, and their interactions with OsHOS59 represent molecular mechanisms for transcriptional regulation of developmental processes in rice that have not been previously described.

[0739] The identification of protein-protein interactions in rice has important commercial applications. Modulation of these interactions can allow control of biological processes mediated by these molecules, resulting in the introduction of desirable traits in genetically engineered plants. The proteins identified in the present Example can be exploited for the development of genetically engineered crops that exhibit desirable changes in plant development. In addition, these proteins can allow the identification of compounds that affect plant development.

[0740] Plants can regenerate individual plants through the regeneration of adventitious shoots or adventitious embryos from undifferentiated tissues derived from somatic cells, a process regulated by the interaction of plant hormones such as auxins and cytokinins. In addition to responding to the signals produced by plant hormones, homeobox genes are involved in plant morphogenesis. The regeneration ability of plants is exploited for the production of young plants from cultured shoot and for regenerating transformed plants after the introduction of genes into somatic cell tissues or cultured plant cells. Proposed applications for homeobox proteins include the control of plant regeneration, differentiation, and growth, processes. For example, genes capable of promoting regeneration of adventitious roots or adventitious shoots from undifferentiated cells or plant tissues would be useful for agricultural applications. In one such application, an Arabidopsis gene has been identified encoding a protein with a homeodomain which is involved in differentiation, specifically, it induces adventitious shoots and branching from cultured tissue (see PCT International Publication No. WO 01/07618, corresponding to European Patent No. 1 116 793). In another application, ectopic expression of a plant homeobox gene encoding a transcription factor involved in the metabolism of gibberellic acid and resulting in a delayed flowering phenotype was proposed for the production of genetically modified grasses that exhibit inhibition of flowering, absence of inflorescence, increased production of tillers, delayed heading, and inhibition of the developmental switch from vegetative to generative growth. These modified phenotypes represent agronomically valuable traits in grasses bred for both forage and amenity purposes (see European Patent Application No. EP0109570 EP).

[0741] Applications can also be envisioned for the individual proteins identified in this Example. For example, the rice putative eukaryotic translation initiation factor 3 large subunit (OsBAB07943) could be used to identify compounds that inhibit the binding of this plant initiation factor to the cap structure of its mRNAs. Such compounds could function as herbicides. A similar application has been proposed for a plant eukaryotic initiation factor 4E (eIF4E) (Canadian Patent Application No. CA0001412 CA, published Jul. 6, 2001).

### Example V

[0742] The example describes the identification and characterization of rice proteins that interact at the thylakoid of chloroplasts and other cellular membranes. Specifically, described in this example are newly characterized rice proteins interacting with the rice 14-3-3 protein homolog GF14-c (OsGF14-c) and with Defender Against Apoptotic Death 1 (OsDAD1).

[0743] The 14-3-3 proteins (reviewed in Muslin & Xing, 2000) interact with a variety of regulators of cellular signaling, cell cycle, and apoptosis by binding to their partner proteins. The high potential for specific protein-protein interactions makes these proteins suitable for two-hybrid assays. The 14-3-3 proteins are known to participate in protein complexes within the nucleus and are commonly found in the cytoplasm. Studies using yeast two-hybrid assays have also localized GF14 isoforms to the chloroplast stroma and the stromal side of thylakoid membranes (Sehnke et al., 2000). However, the subcellular localization of GF14-c had not been directly assessed to date. Investigation of the protein interactions involving OsGF14-c can lead to the identification of its location within the cell.

[0744] OsDAD1 is encoded by the rice homolog of the highly conserved DAD gene, a suppressor of endogenous programmed cell death, or apoptosis, in animals and plants (Apte et al., 1995; Gallois et al., 1997). In support of this role for DAD, expression of a DAD plant homolog has been shown to be down-regulated during flower petal senescence (an example of programmed cell death) and by the plant hormone ethylene, which is associated with a variety of stress responses and developmental processes (Orzaez & Granell, 1997). While these studies have been conducted with DAD homologs from Arabidopsis and pea, the rice DAD1 is not described in the literature. The interaction studies provided below were aimed at further characterizing this protein.

[0745] An automated, high-throughput yeast two-hybrid assay technology (as described above) was used to search for rice protein that interacted with the bait proteins OsGF14-c and OsDAD1. The sequences encoding the protein fragments used in the search were then compared by BLAST analysis against databases to determine the sequences of the full-length genes. The proteins found appear to be localized to the thylakoid of chloroplasts, vacuolar membrane, and plasma membrane. The results indicate that OsGF14-c is a membrane component in rice. The subset of proteins interacting with OsGF14-c at the thylakoid form a novel chloroplast protein complex involved in the photosynthetic processes. This interaction study also identifies the rice OsDAD1 as a membrane protein, in agreement with previously characterized DAD homologs from other species. Elucidation of the role of proteins interacting at the thylakoid and other cellular membranes in rice chloroplasts can allow the development of herbicides specifically targeted to disrupting the structure and function of the thylakoid or endomembrane system.

Results

[0746] GF14-c was found to interact with EPSP synthase, an enzyme in the shikimate pathway (OsBAB61062); two enzymes with roles in the Calvin cycle reactions in chloroplasts, a rice chloroplastic aldolase (OsBAA02730) and a the chloroplast enzyme ribulose-1,5-bisphosphate carboxylase/oxygenase (RUBISCO; OsRBCL); the RUBISCO activase precursor (OsRCAA1); and two rice photosystem proteins, putative 33 kDa oxygen-evolving protein of photosystem II (OsPN23059) and photosystem II 10 kDa polypeptide (OsAAB46718). Eight additional interactors for GF14-c are novel rice proteins: a photosystem protein (OsPN23061) similar to barley (Hordeum vulgare) photosystem I reaction center subunit II, chloroplast precursor; a protein (OsPN22858) similar to Arabidopsis thaliana GTP cyclohydrolase II, an enzyme involved in the biosynthesis of vitamin B riboflavin (a cofactor in the shikimate pathway); a protein (OsPN22874) similar to A. thaliana phosphatidylinositol-4-phosphate 5 kinase (PI4P5K), an enzyme involved in signaling events associated with water-stress response in plants; two H⁺-ATPases, similar to A. thaliana vacuolar ATP synthase subunit C (OsPN22866) and to barley plasma membrane H⁺-ATPase (OsPN23022); a putative dynamin homolog (OsPN30846) that is likely localized to the chloroplast, as are other plant dynamin family members; and two proteins of unknown function (OsPN29982 and OsPN30974).

[0747] OsDAD1 was found to interact with three membrane proteins: rice beta-expansin (OsEXPB2), which is localized to the plasma membrane adjacent to the cell wall; a novel putative phosphate cotransporter (OsPN23053); and the H⁺-ATPase-like protein OsPN23022 that also interacts with GF14-c.

[0748] The proteins that interacted with OsGF14-c (14-3-3 protein homolog GF14-c) and OsDAD1 are listed in Tables 21 and 22, respectively, followed by detailed information on each protein and a discussion of the significance of the interactions. A diagram of the interactions is provided in FIG. 4. The nucleotide and amino acid sequences of the proteins of the Example are provided in SEQ ID NOs: 83-100 and 277-294.

[0749] Nine of the proteins identified represent rice proteins previously uncharacterized. Based on their presumed biological function and on the ability of the prey proteins to specifically interact with the bait proteins OsGF14-c and OsDAD1, it was speculated that OsGF14-c is a membrane component. Based on the results described below, OsGF14-c is presumably localized to the thylakoid of rice chloroplasts and to other cellular membranes. The proteins interacting in the thylakoid are part of a novel protein complex and are involved in the photosynthetic processes occurring in the chloroplasts. Knowledge of the role of proteins interacting at the thylakoid in rice could be exploited for the development of herbicides specifically targeted to disrupting the structure and function of the thylakoid membrane. The interactions found in this study also identify OsDAD1 as a likely membrane component in rice, an observation consistent with previous reports on other animal and plant DAD homologs.

TABLE 21
Interacting Proteins Identified for OsGF14-c
(14-3-3 protein homolog GF14-c)
The names of the clones of the proteins used as baits and found as preys are given.
Nucleotide/protein sequence accession numbers for the proteins of the Example (or related
proteins) are shown in parentheses under the protein name. The bait and prey coordinates
(Coord) are the amino acids encoded by the bait fragment(s) used in the search and by the
interacting prey clone(s), respectively. The source is the library from which each prey clone
was retrieved.

| | | | |
|---|---|---|---|
| | | | Prey |
| | Protein Name | Bait | Coord |
| Gene Name | (GENBANK ® Accession No.) | Coord | (source) |

BAIT PROTEIN

| | | |
|---|---|---|
| OsGF14-c | O. sativa 14-3-3 Protein Homolog GF14-c | 1-257# |
| PN12464 | (U65957) | |
| (SEQ ID NO: 278) | | |

INTERACTORS

| | | | |
|---|---|---|---|
| OsBAB61062 | O. sativa 3-Phosphoshikimate 1- | 1-150 | 463-511 |
| PN22844 | carboxyvinyltransferase (a.k.a. EPSP | | (input trait) |
| (SEQ ID NO: 280) | Synthase) (AB052962; BAB61062.1) | | |
| OsPN22858 | Novel Protein 22858, Fragment, similar to | 1-150 | 27-154 |
| (SEQ ID NO: 84) | Arabidopsis GTP Cyclohydrolase II | | (input trait) |
| | (BAB09512.1; e = 0) | | |
| OsPN22874 | Novel Protein 22874, Fragment, similar to | 1-150 | 1-88 |
| (SEQ ID NO: 86) | Arabidopsis Putative Phosphatidylinositol-4- | | (input trait) |
| | phosphate 5-kinase | | |
| | (NP_187603.1; 4e⁻¹⁸) | | |
| OsBAA02730 | O. sativa Fructose-Bisphosphate Aldolase, | 1-150 | 206-269 |
| PN22832 | Chloroplast Precursor | | (input trait) |
| (Contig4280.fasta.Contig1) | (Q40677) | | |
| (SEQ ID NO: 282) | | | |
| OsRBCL | O. sativa Chloroplast Ribulose Bisphosphate | 1-150 | 287-462 |
| PN23426 | Carboxylase, Large Chain | | (input trait) |
| (SEQ ID NO: 284) | (D00207; P12089) | | |
| OsRCAA1 | O. sativa Ribulose Bisphosphate | 1-150 | 68-210 |
| PN19842 | Carboxylase/Oxygenase Activase, Large | | (input trait) |
| (SEQ ID NO: 286) | Isoform A1 | | |
| | (AB034698, BAA97583) | | |
| OsPN22866 | Novel Protein PN22866, Fragment, Similar to | 1-150 | 95-305 |
| (Contig388.fasta.Contig2) | A. Thaliana Vacuolar ATP Synthase Subunit | | (input trait) |
| (SEQ ID NO: 88) | C (V-ATPase C subunit) (Vacuolar proton | | |
| | pump C subunit) | | |
| | (Q9SDS7; e⁻¹⁵²) | | |
| OsPN23022$ | Novel Protein PN23022, Fragment, similar to | 1-150 | 149-285 |
| (SEQ ID NO: 90) | H. Vulgare Plasma Membrane H⁺-ATPase | | (input trait) |
| | (CAC50884; e = 0.0) | | |
| OsPN23061 | Hypothetical Protein OsContig3864, Similar to | 1-150 | 94-203 |
| (Contig3864.fasta.Contig1) | H. vulgare Photosystem I Reaction Center | | (input trait) |
| (SEQ ID NO: 92) | Subunit II, Chloroplast Precursor | | |
| | (P36213; 6e⁻⁸⁷) | | |
| OsPN23059 | OsContig4331, O. sativa Putative 33 kDa | 1-150 | 193-333 |
| (Contig4331.fasta.Contig1) | Oxygen-Evolving Protein of Photosystem II | | 90-169 |
| (SEQ ID NO: 288) | (BAB64069) | | (input trait) |
| OsAAB46718 | O. sativa Photosystem II 10 kDa Polypeptide | 1-150 | 82-126 |
| PN22840 | (U86018; T04177) | | (input trait) |
| (FL_R01_003_H20.g.1a.Sp6a | | | |
| TMRI) | | | |
| (SEQ ID NO: 290) | | | |
| OsPN29982 | Novel Protein PN29982 | 1-150 | 201-300 |
| (SEQ ID NO: 94) | | | (input trait) |
| OsPN30846 | Novel Protein PN30846 | 1-150 | 1-266 |
| (SEQ ID NO: 96) | | | (input trait) |
| OsPN30974 | Novel Protein PN30974 | 1-150 | 38-178 |
| (SEQ ID NO: 98) | | | (input trait) |

NOTE:
Interactions of GF14-c with the maize transcription factor Viviparous-1 (ZmVP1) and with Em binding protein (EmBp) are also reported in the literature (Schultz et al., 1998).
#Self-activating clone, i.e., it activates the reporter genes in the two-hybrid system in the absence of a prey protein, and thus it was not used in the search.
$A prey clone of OsPN23022 also interacts with a clone of Defender Against Apoptotic Death 1 (OsDAD1) used as a bait, and the bait OsDAD1 interacts with Beta-Expansin EXPB2 (OsEXPB2) and with Novel Protein 23053, Fragment, Similar to Arabidopsis Putative Na+-Dependent Inorganic Phosphate Cotransporter (OsPN23053). These interactions are shown in Table 22 below.

[0750] TABLE 22
Interacting Proteins Identified for OsDAD1
(Defender Against Apoptotic Death 1)

| | | | |
|---|---|---|---|
| | | | Prey |
| | Protein Name | | Coord |
| Gene Name | (GENBANK ® Accession No.) | Bait Coord | (source) |

BAIT PROTEIN

| | |
|---|---|
| OsDAD1 | O. sativa Defender Against Apoptotic |
| PN20251 | Death 1 |
| (SEQ ID NO: 292) | (D89727; BAA24104) |

INTERACTORS

| | | | |
|---|---|---|---|
| OsPN23022 | Novel Protein PN23022, Fragment, | 30-115 | 37-371 |
| (SEQ ID NO: 90) | similar to H. Vulgare Plasma Membrane | | (input trait) |
| | H⁺-ATPase | | |
| | (CAC50884; e = 0.0) | | |
| OsPN23053 | Novel Protein 23053, Fragment, Similar to | 30-115 | 2x 1-180 |
| (SEQ ID NO: 100) | Arabidopsis Putative Na+-Dependent | | (input trait) |
| | Inorganic Phosphate Cotransporter | | |
| | (NP_181341.1; e⁻¹⁰⁵) | | |
| OsEXPB2 | Beta-Expansin EXPB2 | 1-115 | 80-207 |
| PN19902 | (U95968; AAB61710) | | (input trait) |
| (SEQ ID NO: 294) | | 30-115 | 183-261 |
| | | | 2x 80-218 |
| | | | (input trait) |

Two-Hybrid System Using Os GF14-c as Bait

[0751] GF14-c (GENBANK® Accession No. U65957) is a 256-amino acid protein that has been reported to interact with site-specific DNA-binding proteins (e.g., basic leucine zipper factor EmBP1) and tissue-specific regulatory factors (i.e., viviparous-1; VP-1; Schultz et al., 1998). It can act to form complexes with EmBP1 and VP-1 to mediate gene expression. The 14-3-3 proteins are found in virtually every eukaryotic organism and tissue and usually consist, in any given organism, of multiple protein isoforms (De Lille et al., 2001). They are thought to act as molecular scaffolds or chaperones and to regulate the cytoplasmic and nuclear localization of proteins with which they interact by regulating their nuclear import/export (Zilliacus et al., 2001; reviewed by Muslin & Xing, 2000. The 14-3-3 proteins bind to a multitude of functionally diverse regulatory proteins involved in cellular signaling pathways, cell cycling, and apoptosis. In plants, enzymes under the control of 14-3-3 proteins include starch synthase, Glu synthase, F1 ATP synthase, ascorbate peroxidase, and affeate o-methyl transferase, plasmamembrane H⁺-ATPase, light- and substrate-regulated metabolic enzymes of the nitrogen and carbon assimilation pathways, and those involved in transcriptional regulation such as the G-box complex and core transcription factors TBP, TFIIB, and EmBP. However, the specific 14-3-3 isoforms required by each of these pathways have not been fully characterized (De Lille et al., 2001). The 14-3-3 proteins have previously been detected as participants in protein complexes within the nucleus (Bihn et al., 1997; Imhof & Wolffe, 1999; Zilliacus et al., 2001), in the cytoplasm, and mitochondria (De Lille et al., 2001). Plant 14-3-3 proteins have also been localized to the chloroplast stroma and the stromal side of thylakoid membranes (Sehnke et al., 2000). However, subcellular localization of GF14-c has not been directly assessed and thus its location within the cell is yet to be precisely defined.

[0752] Analysis of the amino acid sequence of GF14-c identified a cAMP- and GMP-dependent phosphorylation site at amino acids 107 to 110, six protein kinase C phosphorylation sites (amino acids 10 to 12, 29 to 31, 56 to 61, 29 to 31, 59 to 61, and 74 to 76), three casein kinase II phosphorylation sites (amino acids 110 to 113, 120 to 123, and 177 to 180), an N-myristoylation site (amino acids 9 to 14), and two amidation sites (amino acids 77 to 80 and 105 to 108). The bait fragment used in this search encodes amino acids 1 to 150 of GF14-c. A BLAST analysis comparing the nucleotide sequence of GF14-c against TMRI's GENECHIP® Rice Genome Array sequence database identified probeset OS009195_at (e⁻⁴⁸ expectation value) as the closest match. Gene expression experiments indicated that this gene is not specifically expressed in several different tissue types and is not specifically induced by a broad range of stresses, herbicides, and applied hormones.

[0753] The bait protein encoding amino acids 1 to 150 of GF14-c was found to interact with O. sativa 3-phosphoshikimate 1-carboxyvinyltransferase (also referred to as 5-enolpyruvylshikimate-3-phosphate (EPSP) synthase (EPSPS); OsBAB61062). OsBAB61062 is a 511-amino acid protein that contains an EPSP synthase signature 1 site (amino acids 162 to 176), an EPSP signature 2 site (amino acids 423 to 441), and it is alanine-rich at the N-terminus. A BLAST analysis of the amino acid sequence of OsBAB61062 determined that this protein is the rice 3-phosphoshikimate 1-carboxyvinyltransferase (also commonly referred to as EPSP synthase) (GENBANK® Accession No. BAB61062.1, 83.9% identity, e=0.0). This 511-amino acid enzyme is located in the chloroplasts where it catalyzes an essential step in aromatic amino acid synthesis, referred to as the shikimate pathway. Because EPSP synthase is essential to algae, higher plants, bacteria, and fungi, but not present in mammals, this enzyme is a useful herbicide and antimicrobial target.

[0754] A BLAST analysis comparing the nucleotide sequence of EPSP synthase against TMRI's GENECHIP® Rice Genome Array sequence database identified probeset OS020639.1_at (e⁻¹⁵⁶ expectation value) as the closest match. Gene expression experiments indicated that this gene is induced by jasmonic acid, a plant hormone involved in signal transduction events associated with a plant's stress response, and by M. glisea, the fungus that causes rice blast disease. The gene is repressed under drought conditions.

[0755] The bait protein encoding amino acids 1 to 150 of GF14-c was found to interact with protein 22858, a fragment which is similar to A. thaliana GTP cyclohydrolase II (OsPN22858). This prey clone of OsPN22858 is a 460-amino acid protein fragment with a transmembrane region spanning amino acids 182 to 198 and a possible cleavage site between amino acids 24 and 25, although no N-terminal signal peptide is present. A BLAST analysis of OsPN22858 determined that its amino acid sequence most nearly matches that of GTP cyclohydrolase 11; 3,4-dihydroxy-2-butanone-4-phoshate synthase from A. thaliana (GENBANK® Accession No. BAB09512.1, 74.4% identity, e=0). GTP cyclohydrolase II catalyzes the first committed reaction in the biosynthesis of the B vitamin riboflavin (Ritz et al., 2001).

[0756] A BLAST analysis comparing the nucleotide sequence of Novel Protein 22858 against TMRI's GENECHIP® Rice Genome Array sequence database identified OS015318_s_at (5e⁻¹⁰ expectation value) as the closest match. The expectation value is too low for this probeset to be a reliable indicator of the gene expression of this GTP cyclohydrolase.

[0757] The bait protein encoding amino acids 1 to 150 of GF14-c was found to interact with Protein 22874, a fragment that is similar to A. thaliana putative phosphatidylinositol-4-phosphate 5-kinase (OsPN22874). A BLAST analysis of OsPN22874 determined that its 89-amino acid sequence most nearly matches that of phosphatidylinositol-4-phosphate 5-kinase (PI4P5K) from A. thaliana (GENBANK® Accession No. NP_{—}187603.1, 65.5% identity, 4e⁻¹⁸). PI4P5K is an enzyme that plays a well-defined role in many signaling events in many species, including the endoplasmic reticulum (ER) stress response in plants (Shank et al., 2001). Animal and yeast PI4P5K phosphorylates phosphatidylinositol-4-phosphate to produce phosphatidylinositol-4,5-bisphosphate as a precursor of two second messengers, inositol-1,4,5-triphosphate and diacylglycerol, and as a regulator of many cellular proteins involved in signal transduction and cytoskeletal organization (reviewed in Mikami et al., 1998). Mikami et al. identified a full-length cDNA clone encoding a PI4P5K protein in A. thaliana whose mRNA expression is induced by treatment of the plant with drought, salt and abscisic acid, suggesting that this protein is involved in water-stress signal transduction (Mikami et al., 1998). Elge et al. report that A. thaliana PI4P5K is expressed predominantly in vascular tissues of leaves, flowers and roots, namely in cells of the lateral meristem, i.e., the procambium (Elge et al., 2001).

[0758] The bait protein encoding amino acids 1 to 150 of GF14-c was also found to interact with O. sativa fructose-bisphosphate aldolase, a chloroplast precursor (OsBAA02730). OsBAA02730 (GENBANK® Accession No. Q40677) is a 388-amino acid protein that includes a fructose-bisphosphate aldolase class-I active site (amino acids 44 and 388), as determined by analysis of the amino acid sequence (8.5e⁻²²⁸). A BLAST analysis of the amino acid sequence of OsBAA02730 indicated that this protein is the rice fructose-bisphosphate aldolase, chloroplast precursor (GENBANK® Accession No. Q40677). The gene encoding chloroplastic aldolase was isolated along with that encoding the cytoplasmic form of the enzyme (Tsutsumi et al., 1994). The chloroplastic aldolase is encoded at a single locus, while the cytoplasmic form is distributed between three loci on the genome. Aldolases are present in higher plants as two isoforms: the cytosolic and the chloroplastic types. The cytoplasmic form is highly conserved among plants and appears to be regulated through a Ca²⁺-mediated protein kinase/phosphatase pathway (Nakamura et al., 1996). This enzyme is though to have a role in the fruit ripening process (Schwab et al., 2001). The chloroplastic enzyme is involved in two major sugar phosphate metabolic pathways of green chloroplasts: the C3 photosynthetic carbon reaction cycle (Calvin cycle) and reactions of the starch biosynthetic pathway. In both cases, aldolase catalyzes the formation of fructose 1,6-biphosphate from dihydroxyacetone 3-phosphate and glyceraldehyde 3-phosphate. These topics are reviewed by Michelis et al., 2000, in which is described a 44-kDa heat-induced isoform of the fructose-bisphosphate aldolase in oat chloroplast, confirming its localization to the thylakoid membrane and suggesting that this enzyme is not embedded but rather tends to adhere to the chloroplast membranes. Similar heat-induced thylakoid-associated aldolase homologues were found in other plant species.

[0759] A BLAST analysis comparing the nucleotide sequence of the aldolase protein against TMRI's GENECHIP® Rice Genome Array sequence database identified probeset OS006916.1_at (e⁻¹⁵⁶ expectation value) as the closest match. Our gene expression experiments indicate that this gene is down-regulated by jasmonic acid and drought.

[0760] In addition, the bait protein encoding amino acids 1 to 150 of GF14-c was found to interact with O. sativa ribulose bisphosphate carboxylase large chain precursor (RUBISCOLarge Subunit; OsRBCL). A BLAST analysis of the amino acid sequence of OsRBCL determined that this protein is the rice chloroplast ribulose bisphosphate carboxylase, large chain precursor (RUBISCO; GENBANK® Accession No. P12089). RUBISCO is a 477-amino acid protein present in the chloroplast of higher plants, with an active site in position 196-204. The chloroplast RUBISCO is part of the CO₂-fixing multienzyme complexes bound to the thylakoid membrane (Suss et al., 1993) with roles in the Calvin cycle reactions that occur in the stroma of the chloroplast during photosynthesis. The starting and ending compound in the Calvin cycle is the five-carbon sugar ribulose 1,5-bisphosphate (RuBP). As its name indicates, RuBP carboxylase/oxygenase catalyzes two types of reactions that involve RuBP. In the presence of high carbon dioxide and low oxygen concentrations, the carboxylase activity of RUBISCO is favored and the enzyme catalyzes the initial reaction in the Calvin cycle, the carboxylation of RuBP, leading to the formation of 3-phosphoglyceric acid (PGA). However, in the presence of low carbon dioxide and high oxygen concentrations, oxygen competes with carbon dioxide as a substrate for RUBISCO and the enzyme's oxygenase activity also occurs, resulting in condensation of oxygen with RuBP to form 3-phosphoglycerate and phosphoglycolate. RUBISCO is the world's most abundant enzyme, accounting for as much as 40 percent of total soluble protein in leaves (these topics are discussed in Raven et al., 1999).

[0761] A BLAST analysis comparing the nucleotide sequence of the RUBISCO protein against TMRI's GENECHIP® Rice Genome Array sequence database identified probeset OS000296_S_at (e=0 expectation value) as the closest match. Gene expression experiments indicated that this gene is down-regulated by BAP, 2,4-D, BL2, jasmonic acid, gibberellin, and abscisic acid. The gene is up-regulated under osmotic stress conditions.

[0762] The bait protein encoding amino acids 1 to 150 of GF14-c was found to interact with O. sativa ribulose bisphosphate carboxylase/oxygenase activase, large isoform A1 (OsRCAA1). A BLAST analysis of the amino acid sequence of OsRCAA1 determined that this 466-amino acid protein is the rice RUBISCO activase large isoform precursor (GENBANK® Accession No. BAA97583). It contains two active sites (amino acid 31 to 38 and 156 to 163). RUBISCO activase is an AAA+(ATPases associated with a variety of cellular activities) protein that facilitates the ATP-dependent removal of sugar phosphates from RUBISCO active sites. This action frees the active site of RUBISCO for spontaneous carbamylation by CO2 and metal binding, prerequisites for activity (reviewed in Salvucci et al., 2001; Salvucci & Ogren, 1996).

[0763] The bait protein encoding amino acids 1 to 150 of GF14-c was found to interact with protein PN22866, a fragment similar to A. thaliana vacuolar ATP synthase subunit C (V-ATPase C subunit; vacuolar proton pump C subunit; OsPN22866). OsPN22866 is a 408-amino acid protein fragment. Its amino acid sequence most nearly matches that of A. thaliana Vacuolar ATP synthase subunit C (V-ATPase C subunit; Vacuolar proton pump C subunit; Q9SDS7, 72.7% identity, e⁻¹⁵²), as determined by BLAST analysis. The H⁺-translocating ATPases (H⁺-ATPase, V-ATPase) are multi-subunit enzymes that function as essential proton pumps in eukaryotes. The catalytic site of human V-ATPase consists of a hexamer of three A subunits and three B subunits that bind and hydrolyze ATP and are regulated by accessory subunits C, D and E (van Hille et al., 1993).

[0764] ATPases are essential cellular energy converters that transduce the chemical energy of ATP hydrolysis from transmembrane ionic electrochemical potential differences. The plant ATPases are present in chloroplasts, mitochondria and vacuoles. In vacuoles, ATPases regulate the contents and volume of vacuoles, which depends on the coordinated activities of transporters and channels located in the tonoplast (vacuolar membrane). The V-ATPase uses the energy released during cleavage of the phosphate group of cytosolic ATP to pump protons into the vacuolar lumen, thereby creating an electrochemical H⁺-gradient that is the driving force for transport of ions and metabolites. Thus V-ATPase is important as a ‘house-keeping’ and as a stress response enzyme. Expression of V-ATPase has been shown to be highly regulated depending on metabolic conditions. The V-ATPase consists of several polypeptide subunits that are located in two major domains, a membrane peripheral domain (V₁) and a membrane integral domain (V₀). Subunit C is a highly hydrophobic protein containing four membrane-spanning domains. The function of subunit C is unknown, although it is suggested to be directly involved in H⁺ transport and might be involved in stabilization of V₁. The structure, function and regulation of the plant V-ATPase are reviewed in Ratajczak R., 2000.

[0765] The bait protein encoding amino acids 1 to 150 of GF14-c was also found to interact with protein PN23022, a fragment similar to H. Vulgare plasma membrane H⁺-ATPase (OsPN23022). Protein PN23022 is a 534-amino acid fragment that includes seven transmembrane domains (amino acids 170 to 186, 202 to 218, 226 to 242, 266 to 282, 308 to 324, 337 to 353, and 373 to 389), as predicted by analysis of its amino acid sequence. A BLAST analysis of the amino acid sequence of OsPN23022 determined that this protein is similar to H. vulgare plasma membrane H⁺-ATPase (GENBANK® Accession No. CAC50884; 88.2% identity, e=0 expectation value), an enzyme that translocates protons into intracellular organelles or across the plasma membrane of eukaryotic cells. A BLAST analysis comparing the nucleotide sequence of Novel protein PN23022 against TMRI's GENECHIP® Rice Genome Array sequence database identified OS000972_f_at (e⁻¹¹ expectation value) as the closest match. The expectation value is too low for this probeset to be a reliable indicator of the gene expression of this ATPase. OsPN23022 was also found to interact with Defender Against Apoptotic Death 1 (OsDAD1; see Table 22).

[0766] The bait protein encoding amino acids 1 to 150 of GF14-c was found to interact with protein OsContig3864, which is similar to H. vulgare photosystem I reaction center subunit II, chloroplast precursor (OsPN23061). Analysis of the OsContig3864 amino acid sequence predicted that it is a 203-amino acid protein containing a possible cleavage site between amino acids 21 and 22, although there appears to be no N-terminal signal peptide. A BLAST analysis determined that the OsContig3864 clone has an amino acid sequence that most nearly matches that of H. vulgare photosystem I reaction center subunit II, chloroplast precursor (Photosystem 120 kDa subunit; PSI-D; GENBANK® Accession No. P36213, 80% identity, 3e⁻⁸⁶). The photosystems (photosystems I and II) are large multi-subunit protein complexes embedded into the photosynthetic thylakoid membrane. They operate in series and catalyze the primary step in oxygenic photosynthesis, the light-induced charge separation process by which light energy from the sun is converted to carbon dioxide and carbohydrates in plants and cyanobacteria. Photosystem I catalyzes the light-induced electron transfer from plastocyanin/cytochrome c6 on the lumenal side of the membrane (inside the thylakoids) to ferredoxin/flavodoxin at the stromal side by a chain of electron carriers (reviewed in Fromme et al., 2001).

[0767] A BLAST analysis comparing the nucleotide sequence of OsContig3864 against TMRI's GENECHIP® Rice Genome Array sequence database identified probeset OS000721 at (e=0 expectation value) as the closest match. Gene expression experiments indicated that this gene is not specifically expressed in several different plant tissue types and is not specifically induced by a broad range of stresses, herbicides, and applied hormones.

[0768] The bait protein encoding amino acids 1 to 150 of GF14-c was also found to interact with OsContig4331, an O. sativa putative 33 kDa oxygen-evolving protein of photosystem II (OsPN23059). The two prey clones retrieved from the input trait library encode amino acids 193 to 333 and 90 to 169 of OsContig4331. These clones are non-overlapping, suggesting that multiple GF14-c-binding sites exist within OsContig4331. Analysis of the OsContig4331 protein sequence predicted that it codes for a 333-amino acid protein. The analysis also indicated that OsContig 4331 contains a possible cleavage site between amino acids 37 and 38, although no N-terminal signal peptide is evident. A BLAST analysis of the OsContig 4331 amino acid sequence determined that this protein is the rice putative 33 kDa oxygen-evolving protein of photosystem II (GENBANK® Accession No. BAB64069, 90.6% identity, e⁻¹⁶⁹). Photosystem II uses photooxidation to convert water to molecular oxygen, thereby releasing electrons into the photosynthetic electron transfer chain.

[0769] A BLAST analysis comparing the nucleotide sequence of OsContig4331, rice Photosystem I Reaction Center Subunit II Precursor against TMRI's GENECHIP® Rice Genome Array sequence database identified probeset OS000372_at (e=0 expectation value) as the closest match. The gene expression experiments disclosed herein indicate that this gene is down-regulated during cold stress.

[0770] The bait protein encoding amino acids 1 to 150 of GF14-c was also found to interact with O. sativa photosystem II 10 kDa polypeptide (OSAAB46718). OSAAB46718 is a 126-amino acid protein fragment that includes a predicted transmembrane domain (amino acids 102 to 118). A BLAST analysis against the Genpept database revealed that OsAAB46718 is the Oryza sativa photosystem II 10 kDa polypeptide (GENBANK® Accession No. T04177, 91.2% identity, 2e⁻⁶¹).

[0771] The bait protein encoding amino acids 1 to 150 of GF14-c was also found to interact with protein PN29982 (OsPN29982). The 300-amino acid sequence of the protein OsPN29982 most nearly matches that of a putative protein of unknown function from A. thaliana (GENBANK® Accession No. NP_{—}196688.1, 47% identity, 3e-054), as determined by BLAST analysis. The second best match was CHICK LIM/homeobox protein Lhx1 (Homeobox protein LIM-1; GENBANK® Accession No. P53411, 28% identity, e=0.002). Based on the homeoboxdomain, this interaction can be similar to 14-3-3 protein interactions with transcription factors like VP1.

[0772] The bait protein encoding amino acids 1 to 150 of GF14-c was also found to interact with protein PN30846 (OsPN30846). A BLAST analysis of protein OsPN30846 determined that its 266-amino acid sequence most nearly matches that of dynamin homolog from the leguminous plant Astragalus sinicus (GENBANK® Accession No. AAF19398.1, 70.6% identity, 2e⁻⁹⁹). Since the discovery of the GTP-binding dynamin in rat brain, dynamin-like proteins have been isolated from various organisms and tissues and shown to be involved in diverse and seemingly unrelated biological processes. Many different isoforms of dynamin-like proteins have been identified in plant cells, and these plant homologs can be grouped into several subfamilies, such as G68/ADL1, ADL2 and ADL3, based on their amino acid sequence similarity (reviewed in Kim et al., 2001). The biological roles have been characterized for a few of these plant dynamin-like proteins. The dynamin-like protein ADL1 from Arabidopsis has been shown to be localized to and to be involved in biogenesis of the thylakoid membranes of chloroplasts (Park et al., 1998). Another Arabidopsis dynamin-like protein, ADL2, is targeted to the plastid, and its recombinant form expressed in E. coli binds specifically to phosphatidylinositol 4-phosphate through the pleckstrin homology (PH) domain present in ADL2 (Kim et al., 2001). Based on the similarity between the biochemical properties of ADL2 and those of dynamin and other related proteins, ADL2 can be involved in vesicle formation at the chloroplast envelope membrane.

[0773] The bait protein encoding amino acids 1 to 150 of GF14-c was also found to interact with protein PN30974 (OsPN30974). A BLAST analysis of the novel protein OsPN30974 determined that its 476-amino acid sequence most nearly matches that of an Arabidopsis hypothetical protein of unknown function (GENBANK® Accession No. NP_{—}173623.1, 49% identity, e-137). The next 13 best hits with an expectation value <e⁻¹⁵ are all Arabidopsis or rice proteins of unknown function annotated in the public domain.

Two-Hybrid System Using OsDAD1 as Bait

[0774] A second bait protein, namely O. sativa Defender Against Apoptotic Death 1 (OsDAD1), was used to identify interactors. OsDAD1 (GENBANK® Accession No. BAA24104) is a 114-amino acid protein that includes three predicted transmembrane domains (amino acids 33 to 49, 59 to 75, and 94 to 110). DAD1 is a suppressor of programmed cell death, or apoptosis, a process in which unwanted cells are eliminated during growth and development. DAD is a highly conserved protein with homologs identified in animals and plants (Apte et al., 1995; Gallois et al, 1997). Dysfunction and down-regulation of this gene has been linked to programmed cell death in these organisms (Lindholm et al., 2000). DAD1 is an essential subunit of the oligosaccharyltransferase that is located in the ER membrane (Lindholm et al., 2000). DAD1 expression declines dramatically upon flower anthesis disappearance in senescent petals and is down-regulated by the plant hormone ethylene (Orzaez & Granell, 1997), which is involved in a variety of stress responses and developmental processes including petal senescence (Shibuya et al., 2000), cell elongation, cell fate patterning in the root epidermis, and fruit ripening (Ecker, 1995).

[0775] Two clones, encoding amino acids 1-115 and 30-115 of OsDAD1, were used as baits in this Example.

[0776] OsDAD1 was found to interact with protein 23053, a fragment which is similar to Arabidopsis putative Na⁺-dependent inorganic phosphate cotransporter (OsPN23053). OsPN23053 is a protein fragment; however, its available 379-amino acid sequence contains five predicted transmembrane regions (amino acids 100 to 116, 118 to 134, 226 to 242, 259 to 275, and 324 to 340) and a cleavable signal peptide (amino acids 1 to 46). A BLAST analysis determined that OsPN23053 is similar to an Arabidopsis putative Na⁺-dependent inorganic phosphate cotransporter (GENBANK® Accession No. NP_{—}181341.1, 55.4% identity, e⁻¹⁰⁵). In mammals, Na⁺-dependent inorganic phosphate cotransporter is present in neuronal synaptic vesicles and endocrine synaptic-like microvesicles as a vesicular glutamate transporter and is responsible for storage of glutamate, the major excitatory neurotransmitter in the mammalian central nervous system (CNS; Takamori et al., 2000). At least two isoforms of Na⁺-dependent inorganic phosphate cotransporter exist (Takamori et al., 2000; Aihara et al., 2000) and are expressed in pancreas and brain (Hayashi et al., 2001; Fujiyama et al., 2001). OsPN23053 is the first of a family of Na⁺-dependent inorganic phosphate cotransporters to be discovered in rice. Plants utilize glutamate in important biological processes including protein synthesis and glutamate-mediated signaling (Lacombe et al., 2001). The formation of glutamate from glutamine during nitrogen recycling (Singh et al., 1998) and the control of nitrogen assimilatory pathways by light-signaling (Oliveira et al., 2001) in plants suggest a link between glutamate formation and light-signal transduction.

[0777] OsDAD1 was found to interact with beta-expansin EXPB2 (OsEXPB2). A BLAST analysis of the amino acid sequence of OsEXPB2 determined that this protein is rice beta-expansin (GENBANK® Accession No. AAB61710, 99.6% identity, e⁻¹⁵⁶). Expansins promote cell wall extension in plants. Shcherban et al. isolated two cDNA clones from cucumber that encode expansins with signal peptides predicted to direct protein secretion to the cell wall (Shcherban et al., 1995). These authors identified at least four distinct expansin cDNAs in rice and at least six in Arabidopsis from collections of anonymous cDNAs (i.e. Expressed Sequence Tags; ESTs). They determined that expansins are highly conserved in size and sequence and suggest that this multigene family formed before the evolutionary divergence of monocotyledons and dicotyledons. Their analyses indicate no similarities to known functional domains that might account for the action of expansins on wall extension, though a series of highly conserved tryptophans can mediate expansin binding to cellulose or other glycans.

Summary

[0778] The thylakoid membrane of the chloroplasts contains the photosynthetic pigments, reaction centres, and electron transport chains associated with photosynthesis. Localization of OsGF14-c to this site is consistent with the interactions of OsGF14-c with the photosystem proteins of this Example. The photosystems (photosystems I and II) are large multi-subunit protein complexes embedded in the thylakoid membrane. As part of a larger group of protein-pigment complexes, the photosynthetic reaction centers, they catalyze the light-induced charge separation associated with photosynthesis. Both photosystems use the energy of photons from sunlight to translocate electrons across the thylakoid membrane via a chain of electron carriers. The electron transfer processes are coupled to a build-up of a difference in proton concentration across the thylakoid membrane. The resulting electrochemical membrane potential drives the synthesis of ATP, which is used to reduce CO₂ to carbohydrates in the subsequent dark reactions. OsGF14-c is found to interact with OsContig3864, similar to photosystem I reaction center subunit II, chloroplast precursor, with OsContig4331, the rice putative 33 kDa oxygen-evolving protein of photosystem II, and with rice photosystem II 10 kDa polypeptide. The validity of these interactions is supported by results in a report by Sehnke et al., 2000, which reported the use of yeast two-hybrid technology to identify an interaction between a plant 14-3-3 protein and another photosystem I subunit protein, A. thaliana photosystem I N-subunit At pPSI-N. The interactions of OsGF14-c with OsPN23061 (OsContig3864), OsPN23059 (OsContig4331), and OsAAB46718 (photosystem II 10 kDa polypeptide) suggest that OsGF14-c has a role in coupling the physical contact between proteins in or on the periphery of thylakoid membranes.

[0779] Given the interactions of OsGF14-c and components of the chloroplast photosystem, some of the other proteins found to interact with OsGF14-c in this study are likely to be localized to the chloroplast as well, and they are possibly co-located to the thylakoid membrane as interaction complexes. For example, OsGF14-c interacts with EPSP synthase (OsBAB61062), a shikimate pathway enzyme located in the chloroplast, where aromatic amino acid synthesis initiates. It is interesting to note that an enzyme in the shikimate pathway requires a flavin as a cofactor (Bornemann et al., 1996) and that OsGF14-c also interacts with OsPN22858, a novel protein fragment similar to A. thaliana GTP cyclohydrolase II. GTP cyclohydrolase II participates in the biosynthesis of the B vitamin riboflavin, which is a cofactor for enzymes functioning in the shikimate pathway. The interactions of these proteins with OsGF14-c can keep key proteins of the shikimate pathway in close proximity in or at the thylakoid. The interactions of OsGF14-c with chloroplastic aldolase (OsBAA02730), an enzyme shown to be localized to the thylakoid membrane and involved in the sugar phosphate metabolic pathway of chloroplasts, and with the Calvin cycle enzyme RUBISCO (OsRBCL) and RUBISCO activase large isoform precursor (OsRCAA1) further support localization of OsGF14-c and these interactors to the thylakoid membrane. Previous reports have identified a fructose-bisphosphate aldolase isoform at the thylakoid membrane in oat chloroplasts (Michelis et al., 2000).

[0780] In addition, a novel interactor identified for OsGF14-c is a putative dynamin homolog (OsPN30846). Plant dynamin-like proteins have been localized to the thylakoid and envelope membranes of chloroplasts (Park et al., 1998; Kim et al., 2001). Thus it is likely that this rice dynamin homolog is a membrane protein that resides in the chloroplast. This and the fact that other interactors identified for OsGF14-c are present in the thylakoid of chloroplasts substantiates the notion that the 14-3-3 protein functions as a component of the thylakoid or envelope membrane of chloroplasts. In further support of this hypothesis, a recombinant Arabidopsis dynamin-like protein member of the ADL2 subfamily binds specifically to phosphatidylinositol 4-phosphate. The interactions between dynamins and phosphoinositides documented in the literature (reviewed in Kim et al., 2001) are consistent with the concomitant presence of the dynamin-like protein OsPN30846 and the phosphatidylinositol-4-phosphate 5-kinase OsPN22874 (rice PI4P5K), both interacting with OsGF14-c, at the thylakoid. The interactors described above might be part of a protein complex involved in the photosynthetic processes at the thylakoid membrane.

[0781] In addition to components of the chloroplast thylakoid, OsGF14-c was found to interact with proteins similar to a plasma membrane H⁺-ATPase (OsPN23022) and to a vacuolar ATPase (OsPN22866), which suggests that OsGF14-c is also present in plasma and vacuolar membranes. The interactions of OsGF14-c with the ATPases can represent 14-3-3 regulation of the plant turgor pressure. This hypothesis is corroborated by reports of 14-3-3 proteins accomplishing this function via regulation of at least one form of a plasma membrane H⁺ ATPase (reviewed in DeLille et al., 2001). The interaction of the vacuolar ATPase with OsGF14-c can occur in the vacuolar membrane, but also in membranes of the ER, Golgi bodies, coated vesicles, and provacuoles.

[0782] The biological significance of the interaction of OsGF14-c with the novel protein OsPN22874 (rice PI4P5K) can be defined based on functional homology with A. thaliana PI4P5K, which is induced under water-stress conditions and is expressed in leaves. Given the interaction of OsGF14-c with components of the thylakoid and vacuolar membranes, the rice PIP5K can be located in the chloroplast but it can also reside at the vacuole, with the vacuolar ATPase. In either case, the rice PIP5K can direct synthesis of molecules involved in kinase signaling events associated with chloroplast protection or vacuole size regulation under abiotic stress.

[0783] Two additional interactors, OsPN29982 and OsPN30974, found for OsGF14-c are proteins of unknown function. Nevertheless, because 14-3-3 proteins acts as chaperones, these interactions can represent a process in which the prey proteins achieve proper protein folding, or OsGF14-c can be responsible for proper subcellular localization of OsPN29982 and OsPN30974. Because all other interactors for OsGF14-c appear to be membrane-associated proteins, OsPN29982 and OsPN30974 are likely to be membrane proteins and can reside at the thylakoid or other cellular membrane structures.

[0784] In summary, some of the rice proteins found to interact with OsGF14-c appear to be located at the thylakoid membrane where they participate in photosynthetic processes occurring in the chloroplast; these interactions are consistent with previously reported localization of 14-3-3 proteins to the chloroplast stroma and the stromal side of thylakoid membranes (Sehnke et al., 2000). Other interactors identified are associated with the plasma or vacuolar membrane. OsGF14-c is, thus, likely to be a membrane component in rice. Because 14-3-3 proteins participate in many types of signaling pathways and are thought to act as molecular chaperones necessary for the assembly, unfolding or transport of proteins through membranes, it is likely that OsGF14-c functions as a molecular glue or stabilizer to regulate the function of the proteins with which it interacts at the thylakoid or other membrane structures. The identification of OsGF14-c as a membrane component represents a novel observation and the first functional characterization of the GF14-c protein in rice. In particular, the proteins identified in this Example as interacting at the thylakoid membrane of chloroplasts represent a novel rice protein complex.

[0785] Three interactors were identified in this study for OsDAD1. One is the putative plasma membrane H⁺-ATPase (OsPN23022) that interacts with OsGF14-c. Evidence exists that both OsDAD1 and H⁺-ATPase are integral membrane proteins (Lindholm et al., 2000; Ratajczak et al., 2000). H⁺-ATPase translocates protons into intracellular organelles or across the plasma membrane of specialized cells, its activity resulting in acidification of intracellular compartments in eukaryotic cells. The acidic interior of lysosomes has been shown to be necessary for apoptosis under some conditions (Kagedal et al., 2001; Bursch, 2001). Thus, the activities of these two enzymes can be necessary for regulation of programmed cell death, and their physical interaction can represent a step in control of this event. Furthermore, 14-3-3 proteins have been implicated in regulation of many cellular processes including apoptosis (van Hemert et al., 2001). It is possible that the interactions of OsPN23022 with GF14-c and with OsDAD1 represent steps in such regulation.

[0786] Another novel interactor found for OsDAD1 is the novel rice Na⁺-dependent inorganic phosphate cotransporter. The rice phosphate cotransporter might also be a membrane protein based on functional homology with its mammalian homologs, which are localized to neuronal and endocrine vesicles and have a role in glutamate storage (Takamori et al., 2000). It is likely that glutamate participates in apoptosis regulation in plants as it does in mammals (Bezzi et al., 2001), and that this occurs in rice through the association of the phosphate cotransporter OsPN23053 with OsDAD1.

[0787] Finally, OsDAD1 was found to interact with the rice beta-expansin. Expansins are localized to the plasma membrane adjacent to the cell wall, from which they mediate cell wall extension. Since genes regulating cell death are part of the defense response, this interaction can be associated with structural changes in the cell wall in response to cell death.

[0788] The interactions here reported represent the first characterization of the DAD1 protein homolog in rice. Notably, the fact that OsDAD1 and its interactors appear to be membrane proteins and that one of them, OsPN23022, interacts with OsGF14-c lend further support to the notion that OsGF14-c is a membrane component.

### Example VI

[0789] The rice senescence-associated protein (Os006819-2510) shares 61.4% amino acid sequence similarity with daylily Senescence-Associated Protein 5, a protein encoded by one (DSA5) of six cDNA sequences the levels of which increase during petal senescence. Transcripts of these genes are found predominantly in petals, their expression increase during petal but not leaf senescence, and they are induced by a concentration of abscisic acid (ABA) that causes premature senescence of the petals. Petal senescence is an example of endogenous programmed cell death, or apoptosis, a process in which unwanted cells are eliminated during growth and development. Genes performing a regulatory function in cell death or survival are important to developmental processes. The rice senescence-associated protein Os006819-2510 was chosen as a bait for these interaction studies based on its potential relevance to plant growth and development.

[0790] To identify proteins that interacted with the rice senescence-associated protein Os006819-2510, an automated, high-throughput yeast two-hybrid assay technology (provided by Myriad Genetics Inc., Salt Lake City, Utah, United States of America) was employed, as has been described above.

Results

[0791] The rice senescence-associated protein Os006819-2510 was found to interact with eight rice proteins. Five interactors are known, namely, the rice histone deacetylase HD1 (OsAAK01712), an enzyme involved in regulation of core histone acetylation; the calcium-binding protein calreticulin precursor (OsCRTC), which also interacts with the starch biosynthetic enzyme soluble starch synthase (OsSSS) and with a novel protein (OsPN29950) of unknown function; low temperature-induced protein 5 (OsLIP5); the dehydrin RAB 16B, which is induced by water stress; and rice putative myosin (OsPN23878), an actin motor protein which also interacts with a putative calmodulin-kinase that is associated with a network of proteins involved in cell cycle regulation (see Examples I and II). Three interactors for senescence-associated protein are novel proteins including a putative callose synthase (OsPN23226), an enzyme involved in the biosynthesis of the glucan callose; a protein similar to barley coproporphyrinogen III oxidase, chloroplast precursor, an enzyme of the chlorophyll biosynthetic pathway (OsPN23485); and a protein similar to Arabidopsis Gamma Hydroxybutyrate Dehydrogenase.

[0792] The interacting proteins of this Example are listed in Table 23, followed by detailed information on each protein and a discussion of the significance of the interactions. The nucleotide and amino acid sequences of the proteins of the Example are provided in SEQ ID NOs: 101-106 and 295-306.

[0793] Note that several prey proteins identified are, like the bait protein Os006819-2510, membrane-associated molecules (OsCRTC, OsPN23226, OsLIP5). Several appear to be associated with cell cycle processes in rice (OsPN23878, Os003118-3674, OsCRTC, OsSSS, OsPN23226, OsAAK01712), while others are involved in the plant stress response (OsRAB16B, OsLIP5, OsCRTC). Some of the proteins identified represent rice proteins previously uncharacterized. Based on the presumed biological function of the prey proteins and on their ability to specifically interact with the bait protein Os006819-2510, Os006819-2510 is speculated to be involved in cell cycle/mitotic processes and in the plant resistance to stress, and can actually represents a link between these processes in rice.

[0794] Proteins that participate in cell cycle regulation in rice can be targets for genetic manipulation or for compounds that modify their level or activity, thereby modulating the plant cell cycle. The identification of genes encoding these proteins can allow genetic manipulation of crops or application of compounds to effect agronomically desirable changes in plant development or growth. Likewise, genes that are involved in conferring plants resistance to stress have important commercial applications, as they could be used to facilitate the generation and yield of crops.

TABLE 23
Interacting Proteins Identified for Os006819-2510
(Hypothetical Protein 006819-2510, Similar to Hemerocallis Senescence-
Related Protein 5)
The names of the clones of the proteins used as baits and found as preys are given.
Nucleotide/protein sequence accession numbers for the proteins of the Example (or related
proteins) are shown in parentheses under the protein name. The bait and prey coordinates
(Coord) are the amino acids encoded by the bait fragment(s) used in the search and by the
interacting prey clone(s), respectively. The source is the library from which each prey clone
was retrieved.

| | | | |
|---|---|---|---|
| | Protein Name | | Prey Coord |
| Gene Name | (GENBANK ® Accession No.) | Bait Coord | (source) |

BAIT PROTEIN

| | |
|---|---|
| Os006819-2510 | Hypothetical Protein 006819-2510, Similar to |
| PN20462 | Senescence-Related Protein 5 from |
| (SEQ ID NO: 296) | Hemerocallis Hybrid Cultivar |
| | (AAC34855.1; e⁻⁹⁷) |

INTERACTORS

| | | | |
|---|---|---|---|
| OsAAK01712 | O. sativa Histone Deacetylase HD1 | 1-150 | 90-221 |
| PN24059 | (AF332875; AAK01712.1) | | (output trait) |
| (SEQ ID NO: 298) | | | |
| OsCRTC* | O. sativa Calreticulin Precursor | 1-273 | 283-301 |
| PN20544 | (AB021259; BAA88900) | | (output trait) |
| (SEQ ID NO: 300) | | | |
| OsLIP5 | Oryza sativa Low Temperature-Induced | 1-150 | 29-60 |
| PN22883 | Protein 5 | | (input trait) |
| (SEQ ID NO: 302) | (AB011368; BAA24979.1) | | |
| OsPN23878# | Oryza sativa Putative Myosin | 1-150 | 685-888 |
| (SEQ ID NO: 304) | (AC090120; AAL31066.1) | | (output trait) |
| OsRAB16B | O. sativa DEHYDRIN RAB 16B | 1-273 | 147-164 |
| PN20554 | (P22911) | | (output trait) |
| (SEQ ID NO: 306) | | | |
| OsPN23226 | Novel Protein PN23226, Callose synthase | 1-273 | 345-432 |
| (SEQ ID NO: 102) | | | (output trait) |
| OsPN23485 | Novel Protein PN23485, Similar to Hordeum | 1-273 | 90-243 |
| (SEQ ID NO: 104) | vulgare Coproporphyrinogen III Oxidase, | | (output trait) |
| | chloroplast precursor | | |
| | (Q42840; e⁻¹⁶⁹) | | |
| OsPN29037 | Novel Protein PN29037 | 1-150 | 73-165 |
| (SEQ ID NO: 106) | | | (input trait) |

*Additional interactions identified for OsCRTC are listed in Table 24
#Additional interactions identified for OsPN23878 are listed in Table 25

[0795] TABLE 24
Interacting Proteins Identified for OsCRTC
(Calreticulin Precursor)

| | | | |
|---|---|---|---|
| | Protein Name | | |
| | (GENBANK ® | Bait | Prey Coord |
| Gene Name | Accession No.) | Coord | (source) |

BAIT PROTEIN

| | |
|---|---|
| OsCRTC | Calreticulin Precursor |
| PN20544 | (AB021259; BAA88900) |
| (SEQ ID NO: 300) | |

INTERACTORS

| | | | |
|---|---|---|---|
| OsPN29950 | Novel Protein PN29950 | 1-150 | 7-103 |
| (SEQ ID NO: 108) | | | 2x 138-343 |
| | | | 50-343 |
| | | | (output trait) |
| OsSSS | Soluble Starch Synthase | 250-425 | 68-270 |
| PN19701 | (AF165890; AAD49850) | | (input trait) |
| (SEQ ID NO: 308) | | | 97-263 |
| | | | (output trait) |

[0796] TABLE 25
Interacting Proteins Identified for OsPN23878
(Putative Myosin)

| | | | |
|---|---|---|---|
| | Protein Name | | |
| | (GENBANK ® | Bait | Prey Coord |
| Gene Name | Accession No.) | Coord | (source) |

PREY PROTEIN

| | |
|---|---|
| OsPN23878 | Oryza sativa Putative |
| (SEQ ID NO: 304) | Myosin (AC090120; |
| | AAL31066.1) |

BAIT PROTEIN

| | | | |
|---|---|---|---|
| Os003118-3674 | Hypothetical Protein | 75-149 | 824-935 |
| PN20551 | 003118-3674 Similar | | (output trait) |
| (SEQ ID NO: 110) | to Lycopersicon | | |
| | esculentum Calmodulin | | |

[0797] Os006819-2510 is a 276-amino acid protein that includes a cleavable signal peptide (amino acids 1 to 27) and three transmembrane domains (amino acids 48 to 64, 82 to 98, and 233 to 249), as predicted by analysis of its amino acid sequence. The analysis also predicted two endoplasmic reticulum retention motifs, one N-terminal (AFRL) and the other C-terminal (KGGY), and a prokaryotic membrane lipoprotein lipid attachment site beginning with amino acid 57 (Prosite). This site, when functional, is a region of protein processing. Analysis by Pfam also identified a transmembrane superfamily domain, also called a tetraspanin family domain, typically found in a group of eukaryotic cell surface antigens that are evolutionarily related and include transmembrane domains.

[0798] A BLAST analysis against the Genpept database indicated that Os006819-2510 is similar to Senescence-Associated Protein 5 from Hemerocallis hybrid cultivar (daylily; GENBANK® Accession, No. AAC34855.1; 61.4% identity; e⁻⁹⁷). In agreement with this result, the protein with the amino acid sequence most similar (63% identity) to that of Os006819-2510 in Myriad's proprietary database is Hypothetical Protein 005991-3479, Similar to Hemerocallis Senescence-Associated Protein 5 (Os005991-3479). In an effort to identify the components of the genetic program that leads daylily petals to senescence and cell death ca. 24 hours after the flower opens, the cDNA encoding senescence-associated protein 5 in petals was isolated as one of six cDNAs (designated DSA3, 4, 5, 6, 12 and 15) whose levels increase during petal senescence (Panavas et al., 1999). However, no sequence homology was identified in the public database for the DSA5 gene product, which remains as yet unidentified. The levels of DSA mRNAs in leaves was determined to be less than 4% of the maximum detected in petals, with no differences between younger and older leaves, and the DSA genes (except DSA12) are expressed at low levels in daylily roots and (except DSA4) induced by a concentration of abscisic acid that causes premature senescence of the petals.

[0799] Two bait fragments, encoding amino acid 1-273 and 1-150, of Os006819-2510 were used in the yeast two-hybrid screen.

[0800] A bait fragment encoding amino acids 1-150 of Os006819-2510 was found to interact with O. sativa histone deacetylase HD1 (OsAAK01712). A BLAST analysis of the amino acid sequence of OsAAK01712 indicated that this prey protein is the rice Histone Deacetylase HD1 (GENBANK® Accession No. AAK01712.1, 100% identity, e=0.0). Histone deacetylase (HD) enzymes have been isolated from plants, fungi and animals (reviewed by Lechner et al., 1996). The enzymatic activity of histone deacetylase and that of histone acetyltransferase maintain the enzymatic equilibrium of reversible core histone acetylation. Core histones are a group of highly conserved nuclear proteins in eukaryotic cells; they represent the main component of chromatin, the DNA-protein complex in which chromosomal DNA is organized. Besides their role in chromatin structural organization, core histones participate in gene regulation, their regulatory function being ascribed to their ability to undergo reversible posttranslational modifications such as acetylation, phosphorylation, glycosylation, ADP-ribosylation, and ubiquitination. Histone deacetylase exists as multiple enzyme forms, and this multiplicity reflects the complex regulation of core histone acetylation. Four nuclear HDs have been identified and characterized from germinating maize embryos (HD1-A, HD1-BI, HD1-BII, and HD2), based on their expression during germination, molecular weight, physiochemical properties and inhibition by various compounds. Based on these data, Lechner et al., 1996, suggest that HD enzymes have a role in establishing and maintaining histone-protein interactions, and that acetylation can modulate the binding of proteins with anionic domains to certain chromatin areas.

[0801] Os006819-2510 was found to interact with O. sativa Calreticulin Precursor (OsCRTC). A BLAST analysis of the amino acid sequence of the prey clone OsCRTC indicated that this protein is the rice Calreticulin Precursor (GENBANK® Accession No. BAA88900/SwissProt No. Q9SLY8, 100% identity, e=0.0). OsCRTC is a 424-amino acid protein with a cleavable signal peptide (amino acids 1 to 29), a calreticulin family repeat motif (amino acids 218 to 230), and an endoplasmic reticulum targeting sequence (amino acids 421 to 424), as predicted by analysis of the OsCRTC amino acid sequence (see Munro & Pelham, 1987; Pelham, 1990). In agreement with its designation as a calreticulin precursor, the analysis identified a calreticulin family signature calreticulin family signature (amino acids 31 to 343, 1.3e⁻¹⁶⁶) (see Michalak et al., 1992; Bergeron et al., 1994; Watanabe et al., 1994). The analysis also predicted a transmembrane domain (amino acids 7 to 29) and a coiled coil (amino acids 360 to 389). The cDNA encoding the rice calreticulin OsCRTC was first identified by Li & Komatsu, 2000 who found this gene to be involved in the regeneration of rice cultured suspension cells. These authors report that the rice calreticulin protein is highly conserved, showing high homology (70-93%) to other plant calreticulins, but only 50-53% homology to mammalian calreticulins. Calreticulin (CRT) is an endoplasmic reticulum (ER) calcium-binding protein thought to be involved in many functions in eukaryotic cells, including Ca²⁺ signaling, regulation of intracellular Ca²⁺ storage and store-operated Ca²⁺ fluxes through the plasma membrane, modulation of endoplasmic reticulum Ca²⁺-ATPase function, chaperone activity to promote protein folding, control of cell adhesion, gene expression, and apoptosis (reviewed by Michalak et al., 1998 and by Persson et al., 2001). In plants, CRT has been localized to the endoplasmic reticulum, Golgi, plasmodesmata, and plasma membrane (Hassan et al., 1995; Borisjuk et al., 1998; Baluska et al., 2001), and it has been shown to affect cellular calcium homeostasis, as reported by Persson et al., supra. This study shows that induction of calreticulin expression in transgenic tobacco and Arabidopsis plants enhances the ATP-dependent Ca²⁺ accumulation of the endoplasmic reticulum, and that this CRT-mediated alteration of the ER Ca²⁺ pool regulates ER-derived Ca²⁺ signals. These results demonstrate that CRT plays a key role as a regulator of calcium storage in the endoplasmic ER, and that the ER, in addition to the vacuole, is an important Ca²⁺ store in plant cells. A role for the Arabidopsis calreticulin homolog in anther maturation or dehiscence has also been proposed (Nelson et al., 1997) based on localization of this protein in anthers which are degenerating at the time of maximum CRT expression. Furthermore, the tobacco homolog of mammalian CRTC participates in protein-protein interactions in a stress- and ATP-dependent fashion (Denecke et al., 1995). This notion supports the use of the yeast two-hybrid technology to identify proteins that interact with OsCRTC.

[0802] OsCRTC was also used as bait and found to interact with rice Soluble Starch Synthase (OsSSS; see Table 24) and Novel Protein PN29950 (OsPN29950). OsSSS is the rice homolog of soluble starch synthase (SSS), one of the three enzymes involved in starch biosynthesis in plants. Starch is the major component of yield in the world's main crop plants and one of the most important products synthesized by plants that is used in industrial processes. It consists of two kinds of glucose polymers: highly branched amylopectin and relatively unbranched amylose. Starch synthase contributes to the synthesis of amylopectin. The enzyme utilizes the glucosyl donor ADP-glucose (ADPGlc) to add glucosyl units to the nonreducing end of a glucan chain through α(1→4) linkages, thus elongating the linear chains (reviewed by Cao et al., 2000; Kossman & Lloyd, 2000). Distinct classes of isoforms of starch synthase were defined on the basis of similarity in amino acid sequence, molecular mass, and antigenic properties. Plant organs vary greatly in the classes they possess and in the relative contribution of the classes to soluble starch synthase activity (Smith et al., 1997, cited in Cao et al., 2000). OsPN29950 is a protein of unknown function determined by BLAST analysis to be similar to putative protein from Arabidopsis thaliana (GENBANK® Accession No. NP_{—}199037.1, 32% identity, 2e⁻²⁹).

[0803] Os006819-2510 was found to interact with low temperature-induced protein 5 (OsLIP5). OsLIP5 is a 276-amino acid protein with a cleavable signal peptide (amino acids 1 to 27) and three putative transmembrane regions (amino acids 48 to 64, 82 to 98, and 233 to 249). A BLAST analysis of the amino acid sequence of this prey clone determined that it is the rice LIP5 protein (GENBANK® Accession No. BAA24979.1, 100% identity, 8e⁻⁰⁵²). The rice LIP5 protein is a direct submission to the public database and is not described in the literature. In yeast, LIP5 is involved in lipoic acid metabolism (Sulo & Martin, 1993). The BLAST analysis shows that the rice LIP5-like protein OsLIP5 is also similar to rice WSI724 (GENBANK® Accession No. T07613, 98% identity, 3e⁻⁰⁵¹), a protein encoded by one of nine cDNAs induced by short-term water stress and thought to be responsible for acquired resistance to chilling in a chilling-sensitive variety of rice (Takahashi et al., 1994). Among the proteins encoded by these cDNAs, which were found to be differentially expressed following water stress, expression of the WSI724 protein remained relatively fixed. A BLAST analysis comparing the nucleotide sequence of OsLIP5 against TMRI's GENECHIP® Rice Genome Array sequence database identified probeset OS000070_r_at (e=4e⁻⁷⁵) as the closest match. Gene expression experiments indicated that this gene is down-regulated by the herbicide BL2.

[0804] Os006819-2510 was also found to interact with Oryza sativa putative myosin (OsPN23878). A BLAST analysis of the amino acid sequence of OsPN23878 indicated that this prey protein is the rice putative myosin (GENBANK® Accession No. AAL31066.1, 99% identity, e=0.0). OsPN23878 is also similar to Myosin VIII, ZMM3—maize (fragment) from Z. mays (GENBANK® Accession No. A59311, 89% identity, e=0.0). Myosins are discussed in Example I. Based on current knowledge of plant myosins, the myosin VIII prey protein OsPN23878 can be a cytoskeletal component that participates in events relating to cytokinesis.

[0805] The prey protein OsPN23878 also interacts with hypothetical protein 003118-3674, which is similar to Lycopersicon esculentum Calmodulin (Os003118-3674; see Table 25). Os003118-3674 is a 148-amino acid protein with two EF-hand calcium-binding domains (amino acids 22 to 34 and 93 to 105). In agreement with the observation that Os003118-3674 includes EF-hand calcium-binding domains, a BLAST analysis of the Genpept database indicated that this protein shares 72% identity with A. thaliana putative calmodulin (GENBANK® Accession No. NP_{—}1764705, e⁻⁵⁷), although the top hit in this search is A. thaliana putative serine/threonine kinase (GENBANK® Accession No. NP_{—}172695.1, 76% identity, 7e⁻⁶⁰). Therefore, the possibility that this calmodulin-like protein possesses kinase activity is worth consideration.

[0806] A BLAST analysis comparing the nucleotide sequence of OsPN23878 against TMRI's GENECHIP® Rice Genome Array sequence database identified probeset OS002190_I_at (e⁻¹⁶⁵) as the closest match. The gene expression experiments disclosed herein indicated that this gene is not specifically induced under a range of given conditions.

[0807] Additionally, Os006819-2510 was found to interact with OsRAB16B (OsRAB16B), a 164-amino acid protein that has a possible cleavage site between amino acids 51 and 52, although it does not appear to have a cleavable signal peptide. Analysis of its amino acid sequence predicted (2.6e⁻⁸¹) this protein to be a member of a group of plant proteins called dehydrins, which are induced in plants by water stress (see Close et al., 1989; Robertson & Chandler, 1992; Dure et al., 1989). Dehydrins include the basic, glycine-rich RAB (responsive to abscisic acid) proteins. In agreement with this notion, the analysis indicated that OsRAB16B is a basic, glycine-rich protein. A BLAST analysis against the public database revealed that OsRAB16B is the rice DEHYDRIN RAB 16B (GENBANK® Accession No. P22911, 100% identity, 4e⁻⁹⁵). The cDNA encoding this protein was isolated by (Yamaguchi-Shinozaki et al., 1990) as one of four rice RAB genes that are differentially expressed in rice tissues. In agreement with the notion that OsRAB16B is a rice RAB protein, a BLAST analysis against Myriad's proprietary database indicated that OsRAB16B shares 57% identity with OsRAB25. While expression data for OsRAB16B are not available, the rice RAB16B promoter contains two abscisic acid (ABA)-responsive elements required for ABA induction (Ono et al., 1996). Among other rice RAB proteins, the RAB16A gene has been linked to salt stress (Saijo et al., 2001), and the activity of the RAB16A promoter is also induced by ABA and by osmotic stresses in various tissues of vegetative and floral organs (Ono et al., 1996). Another rice RAB protein, RAB21, is induced in rice embryos, leaves, roots and callus-derived suspension cells treated with NaCl and/or ABA (Mundy & Chua, 1988). Based on these data, it is likely that the OsRAB16B prey protein has a role in the stress response.

[0808] Os006819-2510 was found to interact with protein PN23226 (OsPN23226). A BLAST analysis against the public database indicated that OsPN23226 is similar to: putative glucan-synthase (GENBANK® Accession No. NP_{—}563743.1, 78% identity, e=0.0) and to callose synthase 1 catalytic subunit (GENBANK® Accession No. NP_{—}563743.1, 78% identity, e=0.0) from A. thaliana. Callose synthase. (CalS) from higher plants is a multisubunit membrane-associated enzyme involved in callose synthesis (reviewed in Hong et al., 2001). Callose is a linear 1,3-β-glucan with some 1,6-branches and differs from cellulose, the major component of the plant cell wall. Callose is synthesized on the forming cell plate and several other locations in the plant, and its deposition at the cell plate precedes the synthesis of cellulose. Callose synthesis can also be induced by wounding, pathogen infection, and physiological stress. The activity of callose synthase is highly regulated during plant development and can be affected by various biotic and abiotic factors. CalS, like cellulose synthase, is a large transmembrane protein. Its structure includes a large hydrophilic loop that is relatively conserved among the CalS isoforms, a less conserved, long N-terminal segment, and a short C-terminal segment, all located on the cytoplasmic side. The central loop is thought to act as a receptacle to hold other proteins that are essential for CalS catalytic activity (see below); the N-terminal segment can contain subdomains for interaction with proteins that regulate 1,3-β-glucan synthase activity.

[0809] The cDNA encoding the callose synthase (CalS1) catalytic subunit from Arabidopsis was identified by Hong et al., 2001, who demonstrated that higher plants encode multiple forms of CalS enzymes and that the Arabidopsis CalS1 is a cell plate-specific isoform. In addition, these authors used yeast two-hybrid and in vitro experiments to show that CalS1 interacts with two other cell plate-specific proteins, phragmoplastin and a UDP-glucose transferase, and suggest that it can form a large complex with these and other proteins to facilitate callose deposition on the cell plate. Moreover, the plasma membrane CalS is strictly Ca²⁺-dependent, and Ca²⁺ plays a key role in cell plate formation and can activate the cell plate-specific CalS1. The prey protein OsPN23226 is likely a rice callose synthase homolog that can function similarly to the Arabidopsis CalS1 catalytic subunit.

[0810] In addition to the cell plate, callose is synthesized in a variety of specialized tissues and in response to mechanical and physiological stresses. Multiple CalS isozymes are thought to be required in higher plants to catalyze callose synthesis in different locations and in response to different physiological and developmental signals (Hong et al., 2001).

[0811] Os006819-2510 was also found to interact with protein PN23485, which is similar to Hordeum vulgare coproporphyrinogen III oxidase, chloroplast precursor (OsPN23485). A BLAST analysis of the amino acid sequence of OsPN23485 determined that this protein is similar to barley (H. vulgare) Coproporphyrinogen III Oxidase, Chloroplast Precursor (coprogen oxidase; GENBANK® Accession No. Q42840, 89.3% identity, e⁻¹⁶⁹). Coproporphyrinogen III oxidase (CPO) catalyzes a step in the pathway from 5-amino-levulinate to protoporphyrin IX, a common reaction in the biosynthesis of heme in animals and chlorophyll in photosynthetic organisms. The N-terminal sequences of plant CPOs are characteristic of plastid transit peptides. CPO is exclusively located in the stroma of plastids, and in vitro transcribed and translated CPO is imported into the stroma of pea plastids and truncated by a stromal endopeptidase (reviewed by Ishikawa et al., 2001). Plant cDNA sequences encoding CPO were obtained from soybean, tobacco and barley (Kruse et al., 1995). They found that the plant coprogen oxidase mRNA was expressed to different extents in various tissues, with maximum amounts in developing cells and drastically decreased amounts in completely differentiated cells, suggesting differing requirements for tetrapyrroles in different organs. Based on these results, these authors propose that enzymes involved in tetrapyrrole (porphyrin) synthesis are regulated developmentally rather than by light, and that regulation of these enzymes guarantees a constant flux of metabolic intermediates and help avoid photodynamic damage by accumulating porphyrins. Inhibition of the pathway for chlorophyll synthesis causes lesion formation such as that found in the pale green and lesion-formation phenotype of lin2 plants. Ishikawa et al., supra found that a deficiency of coproporphyrinogen III oxidase causes lesion formation in these Arabidopsis mutants. Furthermore, based on the observation that transgenic tobacco plants with reduced CPO activity accumulate photosensitizing tetrapyrrole intermediates and exhibit antioxidative responses and necrotic leaf lesions, these authors suggest that CPO inhibition causes lesion formation leading to induction of a set of defense responses that resemble the HR observed after pathogen attack. These lesions are the equivalent of diseases known as porphyrias in humans. If accumulated, coproporphyrin(ogen), as a photosensitizer, induces damage through generation of reactive oxidative species, which play a key role in the initiation of cell death and lesion formation both in the HR and in certain lesion mimic mutants. They suggest that in lin2 mutants, the generation of an oxidative burst triggered by coproporphyrin accumulation leads to cell death.

[0812] Os006819-2510 was found to interact with protein PN29037 (OsPN29037). A BLAST analysis of the amino acid sequence of OsPN29037 indicated that this prey protein is similar to Gamma Hydroxybutyrate Dehydrogenase from A. thaliana (GENBANK® Accession No. AAK94781.1, 80.7%, identity, e⁻¹²⁷). This enzyme oxidizes gamma-hydroxybutyrate. As a minor brain metabolite directly or indirectly involved in scavenging oxygen-derived free radicals in animals, gamma-hydroxybutyrate demonstrates similarities with melatonin (Cash, 1996).

Summary

[0813] Thus, the senescence-associated protein Os006819-2510 interacts with several proteins that have possible roles in cell cycle processes. One of these is OsPN23878, a protein annotated in the public domain as the rice putative myosin. Myosins are cytoskeletal proteins that function as molecular motors in ATP-dependent interactions with actin filaments in various cellular events. Based on the similarity of the prey protein to a class VIII myosin and on the reported role of plant myosin VIII in maturation of the cell plate and in organization of the actin cytoskeleton at cytokinesis, we speculate that the myosin OsPN23878 is a cytoskeletal component that participates in events occurring at cytokinesis in rice. The association of the myosin OsPN23878 with senescence-associated protein can be a step in cell-cycle-dependent events involving cytoskeleton organization and senescence. Specific expression of the gene encoding OsPN23878 in panicle (our gene expression experiments) is consistent with an interaction between this protein and Os006819-2510, and with a role for the latter in flower senescence, as suggested for the gene encoding the daylily homolog of this protein (Panavas et al., 1999). Localization of senescence-associated protein to the ER suggests that some of the events in which OsPN23878 functions could be associated with plasmodesmata function.

[0814] Note that the myosin protein OsPN23878 also interacts with a novel calmodulin-kinase-like protein Os003118-3674 (see Table 25), and that the latter interacts with a myosin heavy chain (OsAAK98715) found to interact with rice cyclin OsCYCOS2 and presumed to be involved in cytoskeleton organization during mitotic events (see Example II). The interactions of myosins with a calcium-binding calmodulin-like protein are consistent with published evidence of regulation of myosin function by calcium (Yokota et al., 1999a; reviewed in Reddy, 2001). The possibility that Os003118-3674 possesses kinase activity raises the probability that these interactions propagate a cell-cycle-related signaling event. The calmodulin-like protein Os003118-3674 thus provides a link between the senescence-associated protein and interacting partners of this Example and the cell cycle network.

[0815] Another interactor with a possible role in cell cycle regulation is the rice histone deacetylase OsAAK01712. This enzyme includes a transmembrane domain and is involved in regulation of core histones acetylation. The acetylation/deacetylation of histones, the main protein component of chromatin, is connected to replication during the cell cycle in plants, as is in other eukaryotes (Jasencakova et al., 2001). Thus, the Os006819-2510-OsAAK01712 interaction likely participates in mitotic events involving chromatin organization.

[0816] Another novel interactor found for senescence-associated protein is OsPN23485, similar to coproporphyrinogen III oxidase, chloroplast precursor, an enzyme of the pathway leading to the biosynthesis of chlorophyll in plants. The observation that the lesion formation in the lin2 mutant Arabidopsis plants is the result of loss-of-function of CPO (Ishikawa et al., 2001) links the gene encoding CPO to regulation of cell death pathways. Moreover, plant CPO enzymes are regulated developmentally and by light (reviewed by Ishikawa et al., 2001). Based on these reports, the interaction of rice CPO (OsPN23485) with senescence-associated protein can participate in regulation of programmed cell death in a development-dependent manner in rice.

[0817] The senescence-associated protein Os006819-2510, which is presumed to be a transmembrane protein based on analysis of its amino acid sequence, interacts with the rice calreticulin OsCRTC which, like other plant calreticulins, is likely an ER transmembrane protein. The presence of two endoplasmic reticulum retention motifs in Os006819-2510 and of an endoplasmic reticulum targeting sequence in OsCRTC suggests that both proteins are localized in the ER. This notion is in agreement with the possibility of an interaction between Os006819-2510 and OsCRTC in planta. Os006819-2510 can participate in events controlled by OsCRTC within the endoplasmic reticulum. This interaction is consistent with the suggested role of plant CRT in anther maturation and dehiscence, which was proposed by Nelson et al., 1997 based on the observation that maximum expression of the Arabidopsis CRT in the anthers coincides with anther degeneration. Moreover, Denecke et al., 1995 reported detection of another plant CRT homolog in the nuclear envelope, in the ER, and in mitotic cells in association with the spindle apparatus and the phragmoplast. Given the interaction of senescence-associated protein with proteins having roles in mitosis, it is possible that the rice CRT of this Example functions in mitotic events. However, Nelson et al., 1997, indicate possible additional roles for plant CRT in developmental processes, including a chaperone function that can be reconciled with CRT localization in the developing endosperm, a site characterized by high protein synthesis rates, and in secreting nectaries, which are associated with heavy traffic of secretory proteins through the ER. Note that OsCRTC also interacts with the rice soluble starch synthase homolog OsSSS. Soluble starch synthase enzymes have been isolated from plant endosperm cells (Cao et al., 2000). These data suggest that the rice CRT homolog of this Example can also be found in this tissue, where it is conceivable that it interacts with the soluble starch synthase OsSSS in a chaperone role to promote proper folding of this protein during protein synthesis.

[0818] To further corroborate the notion that the rice senescence-associated protein Os006819-2510 is a membrane-associated protein, a novel interactor identified for this protein is a putative callose synthase catalytic subunit (OsPN23226), another transmembrane enzyme involved in glucan synthesis. Plasma membrane proteins participate in a variety of interactions with the cell wall, including synthesis and assembly of cell wall polymers (Buchanan et al., 2002, at page 13). The prey protein OsPN23226 likely functions as its Arabidopsis homolog, a plasma membrane enzyme that utilizes UDP-glucose as substrate to synthesize callose for deposition in the cell wall. The interactions of senescence-associated protein with the rice putative callose synthase OsPN23226 and with the calreticulin OsCRTC, and the interaction between OsCRTC and the soluble starch synthase OsSSS all involve membrane-associated proteins. While there is no evidence that such interactions occur at the same time, they can be associated with the traffic that sorts, distributes and targets membrane proteins and other molecules between compartments of the endomembrane system (Buchanan et al., 2002, at page 14) during the different stages of the cell cycle/development and in response to different physiological and developmental signals. Moreover, the interactions identified in this Example link the senescence-associated bait protein to glucan synthesis, a process that is vital to the plant normal growth. For example, the formation of a functional callose synthase 1 catalytic subunit (CalS1) complex is vital to cell plate formation. Functional characterization of the various components of the CalS1 complex and CalS-associated proteins has been proposed as a means to reveal how the activity of this enzyme is regulated during cell plate formation and to clarify callose synthesis and deposition in plants (Hong et al., 2001). The interaction identified here between senescence-associated protein and the novel putative callose synthase catalytic subunit (OsPN23226) provides new insight into this process in rice.

[0819] Other interactors identified for senescence-associated protein link this protein to the plant stress response. OsRAB16B is a member of the RAB family of proteins known to be induced by water stress and treatment with the plant hormone abscisic acid. ABA levels increase during seed development in many plant species, stimulating production of seed storage proteins and preventing premature germination; ABA is also induced by water stress and is thought to regulate stomatal transpiration (Raven et al., 1999, at page 684). Based on functional homology with other RAB proteins and on the presence of the ABA-responsive elements in the OsRAB16B promoter, we presume that OsRAB16B has a role in the response to abiotic stress in rice and that its function can be regulated by Ca²⁺. Another interactor correlated with stress is low temperature-induced protein 5 (OsLIP5), which in yeast is involved in lipoic acid metabolism. Lipoic acid in animals has been shown to help minimize the effects of systemic stress (Kelly, 1999) and to provide animal cells with significant protection against the cytotoxic effects of repin, a sesquiterpene lactone isolated from Russian knapweed (Robles et al., 1997). The high similarity (98%) of the rice LIP5-like protein to rice WSI724, a protein encoded by a gene induced by water stress and linked to resistance to chilling in rice, points to similar roles for the OsLIP5 prey protein. Gene expression experiments indicate that the gene encoding OsLIP5 is down-regulated upon treatment with the herbicide BL2. This finding suggests a role for OsLIP5 in the response to abiotic stress. While the specific function of the interactions between Os006819-2510 and the prey proteins OsRAB16B and OsLIP5 is not obvious, these interactions can participate in biological processes related to flower senescence and response to water stress and chilling.

[0820] In addition, the rice calreticulin OsCRTC discussed above can also have a role in the stress response. This hypothesis is based on functional homology with the tobacco CRT protein studied by Denecke et al., 1995 and found to participate in protein-protein interactions in a stress-dependent fashion.

[0821] In summary, among the interactors identified for the rice senescence-associated protein Os006819-2510 are several membrane-associated proteins, which supports the notion that the rice Os006819-2510 is a transmembrane protein. Among the interactors identified are proteins involved in cell cycle processes/mitosis and proteins with functions in the plant stress response. Some are newly characterized rice proteins. The interactions identified for rice senescence-associated protein with proteins involved in cell cycle/development and in resistance to stress suggests an overlapping of roles for the bait protein. Indeed, Os006819-2510 can constitute a link between stress tolerance and processes for cell division in rice.

### Example VII

[0822] OsSGT1 is a 367-amino acid protein that includes a tetratricopeptide repeat domain, two variable regions, the CS motif present in metazoan CHORD and SGT1 proteins, and the SGS motif. In yeast, Sgt1 is required for cell-cycle signaling. In yeast, SGT1 associates with the kinetochore complex and the SCF-type E3 ubiquitin ligase by interacting with SKP1. COP9 signalosome interacts with SCF E3 ubiquitin ligases. By its interaction with SCF complexes, SGT1 exerts its essential activity in degrading of SIC1 and CLN1. Thus, one possible role of SGT1 could be to target proteins for degradation by the 26S proteasome via specific SCF complexes or the SGT1 complex can participate in the modification of protein activity or can have a dual role for activation and degradation of the target via ubiquitylation. A. thaliana has two SGT1 homologs. At nonpermissive temperatures AtSGT1a and AtSGT1b can complement G1 and G2 arrest in temperature sensitive sgt1 yeast mutants. However, SGT1b interacts with RAR1 which is required for RPP5 regulated disease resistance to downy mildew. In this scenario, target proteins involved in disease resistance can be targeted for protein degradation by the SGT1 pathway. Barley encodes a SGT1 homolog that also interacts with barley RAR1, which is implicated in disease resistance in barley to downy mildew. (Austin et al., 2002; Azevedo et al., 2002). A BLAST analysis comparing the nucleotide sequence of OsSGT1 against TMRI's GENECHIP® Rice Genome Array sequence database identified probeset OS016424.1 (98%) as the closest match. Gene expression experiments indicated that this gene is up-regulated by the blast infection.

[0823] The rice SGT1 protein shares 74 and 75% amino acid sequence similarity with two Arabidopsis thaliana SGT1 homologs and 45% amino acid sequence similarity with Saccharomyces cerevisiae SGT1. In yeast, SGT1 is required for cell-cycle progression at the G1/S-phase and G2/M-phase transitions. In A. thaliana, SGT1b interacts with Rar1 and mediates disease resistance. Thus, in plants, SGT1 likely controls processes that are fundamental to disease resistance and development. The rice OsSGT1 protein was chosen as a bait for these interaction studies based on its potential relevance to disease resistance and development. One bait fragment encoding amino acid 200-368 of OsSGT1 was used in the yeast two-hybrid screen, as described above.

Results

[0824] The OsSGT1 was found to interact with ten rice proteins. Three interactors have been previously described, namely OsSGT1, a Ras GTPase (GENBANK® Accession No. P40392), and elicitor responsive protein (GENBANK® Accession No. T50649). The remaining seven interactors are novel proteins with identifiable protein domains, or are similar to other proteins. These are an L-aspartase-like protein, an RNA binding domain protein, an auxin induced-like protein, an archain delta COP-like protein, a fibrillin-like protein, a HSP70-like protein, and a proline rich protein. The elicitor responsive protein was also used as a bait and interacted with 12 novel proteins with identifiable protein domains, with similarity to known proteins or that are unidentifiable by sequence similarity. These were an NAD(P) binding domain protein, a gamma adaptin-like protein, a pectinesterase-like protein, a receptor like kinase protein kinase like protein, a pyruvate orthophosphate dikinase like protein, an Isp-4 like protein, a xanthine dehydrogenase like protein, a ubiquitin specific protease like protein and 4 unknown proteins.

[0825] The interacting proteins of this Example are listed in Table 26, followed by detailed information on each protein and a discussion of the significance of the interactions. The nucleotide and amino acid sequences of the proteins of the Example are provided in SEQ ID NOs: 111-150 and 309-316. Based on the biological function of SGT1, it is possible that the interacting proteins are also involved in cell cycle/mitotic processes and/or in the plant resistance to stress. Likewise, the interactors with the elicitor responsive protein can also be involved in plant resistance to stress. Proteins that participate in cell cycle regulation in rice can be targets for genetic manipulation or for compounds that modify their level or activity, thereby modulating the plant cell cycle. The identification of genes encoding these proteins can allow genetic manipulation of crops or application of compounds to effect agronomically desirable changes in plant development or growth. Likewise, genes that are involved in conferring plants resistance to stress have important commercial applications, as they could be used to facilitate the generation and yield of stress-resistant crops.

TABLE 26
Interacting Proteins Identified for Os006819-2510
(Hypothetical Protein 006819-2510, Similar to Hemerocallis Senescence-
Related Protein 5)
The names of the clones of the proteins used as baits and found as preys are given.
Nucleotide/protein sequence accession numbers for the proteins of the Example
(or related proteins) are shown in parentheses under the protein name. The bait
and prey coordinates (Coord) are the amino acids encoded by the bait fragment(s)
used in the search and by the interacting prey clone(s), respectively. The source is
the library from which each prey clone was retrieved.

| | | | |
|---|---|---|---|
| | Protein Name | | |
| Gene Name | (GENBANK ® Accession No.) | Bait Coord | Prey Coord (source) |

BAIT PROTEIN

| | |
|---|---|
| PN20285 | OsSGT1 (gi\|6581058) |
| (SEQ ID NO: 310) | |

INTERACTORS

| | | | |
|---|---|---|---|
| PN24060 | L-aspartase-like protein-like | 200-368 | 176-315 |
| (SEQ ID NO: 112) | | | (output trait) |
| PN20696* | Elicitor responsive protein | 200-368 | 54-144 |
| (OsERP) | (gi\|11358958) | | (input trait) |
| (SEQ ID NO: 312) | | | |
| PN23914 | RNA binding domain protein | 200-368 | 1-263 x 3 |
| (SEQ ID NO: 114) | | | (output trait) |
| PN23221# | Proline rich protein | 200-368 | 182-366 x 2 |
| (SEQ ID NO: 116) | | | (output trait) |
| | | | 207-344 |
| | | | (input trait) |
| | | | 134-254 |
| | | | (output trait) |
| PN20285 | OsSGT1 (gi\|6581058) | 200-368 | 9-227 |
| (SEQ ID NO: 310) | | | (output trait) |
| PN24061 | Auxin induced protein-like | 200-368 | 34-236 |
| (SEQ ID NO: 118) | | | (output trait) |
| PN24063 | RAS GTPase (gi\|730510) | 200-368 | 63-202 |
| (SEQ ID NO: 314) | | | (output trait) |
| PN23949 | HSP70-like | 200-368 | 244-418 |
| (SEQ ID NO: 120) | | | (outpu trait) |
| PN29042 | Fibrillin-like | | |
| (SEQ ID NO: 122) | | | |
| PN28982 | archain delta COP-like | | |
| (SEQ ID NO: 124) | | | |

*Additional interactions identified for elicitor responsive protein are shown in Table 27
#Additional interactions identified for PN23221 are shown in Table 28

[0826] TABLE 27
Interacting Proteins Identified for OsERP
(Elicitor Responsive Protein)

| | | | |
|---|---|---|---|
| | Protein Name | | |
| | (GENBANK ® Accession | Bait | Prey Coord |
| Gene Name | No.) | Coord | (source) |

BAIT PROTEIN

| | |
|---|---|
| PN20696 (OsERP) | Elicitor responsive protein |
| (SEQ ID NO: 312) | (gi\|11358958) |

INTERACTORS

| | | | |
|---|---|---|---|
| PN29984 | Novel Protein PN29984 | 50-145 | 1-38 |
| (SEQ ID NO: 126) | | | 5-41 |
| | | | (input trait) |
| PN30844 | Novel protein PN30844 | 50-145 | 1-64 |
| (SEQ ID NO: 128) | | | (input trait) |
| PN30868 | NAD(P) binding domain | 50-145 | 167-336 |
| (SEQ ID NO: 130) | protein | | (input trait) |
| PN24292 | Gamma adaptin-like | 23-120 | 737-918 |
| (SEQ ID NO: 132) | | | (output) |
| PN29983 | Novel protein PN29983 | 50-145 | 1-131 |
| (SEQ ID NO: 134) | | | (input trait) |
| PN30845 | Pectinesterase-like | 50-145 | 1-64 |
| (SEQ ID NO: 136) | | | (input trait) |
| PN31085 | Receptor-like protein | 23-120 | 378-553 |
| (SEQ ID NO: 138) | kinase-like | | (output trait) |
| PN20674 | Pyruvate orthophosphate | 50-145 | 64-263 |
| (SEQ ID NO: 140) | dikinase-like | | 71-298 |
| | | | (input trait) |
| PN30870 | Isp-4 like | 50-145 | 1-446 |
| (SEQ ID NO: 142) | | | (input trait) |
| PN29997 | Xanthine dehydrogenase- | 23-120 | 737/918 |
| (SEQ ID NO: 144) | like | | (output trait) |
| PN30843 | Ubiquitin specific | 50-145 | 164-221 |
| (SEQ ID NO: 146) | protease-like | | (input trait) |
| PN30857 | Novel protein PN30857 | 50-145 | 1-148 |
| (SEQ ID NO: 148) | | | (input trait) |

[0827] TABLE 28
Interacting Proteins Identified for PN23221
(Proline Rich Protein)

| | | | |
|---|---|---|---|
| | Protein Name | | |
| | (GENBANK ® | | Prey |
| Gene Name | Accession No.) | Bait Coord | Coord (source) |

PREY PROTEIN

| | |
|---|---|
| PN23221 | Proline rich protein |
| (SEQ ID NO: 116) | |

BAIT PROTEIN

| | | | |
|---|---|---|---|
| PN20621 | Shaggy kinase | 120-435 | 175-311 |
| (SEQ ID NO: 316) | (gi\|13677093) | | (output trait) |
| PN20115 | Ring zinc finger | 5-140 | 84-302 |
| (SEQ ID NO: 150) | protein | | 191-324 |
| | | | (output trait) |

Yeast Two-Hyrid Using OsSGT1 as Bait

[0828] The bait fragment encoding amino acid 2.00-368 of OsSGT1 was found to interact with L-aspartase-like protein PN24060. A BLAST analysis of the amino acid sequence of PN24060 indicated that this prey protein has 36.5% similarity to A. thaliana L-aspartase (nucleotide sequence available at GENBANK® Accession No. NM_{—}101325). The enzyme L-aspartate ammonia-lyase (aspartase) catalyzes the reversible deamination of the amino acid L-aspartic acid, using a carbanion mechanism to produce fumaric acid and ammonium ion. While the catalytic activity of this enzyme has been known for nearly 100 years, a number of recent studies have revealed some interesting and unexpected new properties of this reasonably well-characterized enzyme. The non-linear kinetics that are seen under certain conditions have been shown to be caused by the presence of a separate regulatory site. The substrate, aspartic acid, can also play the role of an activator, binding at this site along with a required divalent metal ion. So it is possible that PN24060 catalyses a reaction that pertains to protein modification and the modification can be important for disease resistance or cell cycling.

[0829] The bait fragment encoding amino acid 200-368 of OsSGT1 was also found to interact with elicitor responsive protein, PN20696. A BLAST analysis of the amino acid sequence of the prey clone PN20696 indicated that this protein is the rice elicitor responsive protein (GENBANK® Accession no. T50649; OsERP). OsERP is a 144-amino acid protein that, according to GENBANK®, is expressed by rice culture cells in the presence of the rice blast fungal elicitor. Thus, OsERP can have a role in disease responses in rice.

[0830] OsERP was also used as bait and found to interact with 12 other proteins (see Table 27). These prey are described in this Example below.

[0831] An A. thaliana homologue to OsERP was identified by BLAST. At1 g63220 shares 75% amino acid similarity with OsERP. To see if Arabidopsis homologues of OsERP have roles in disease resistance, Arabidopsis thaliana with T-DNA insertions in At1g63220 (line SAIL_{—}320_D02) was identified from a random insertion seed library. DNA regions surrounding the insertions were sequenced and revealed that the T-DNAs were located within exon 5 of At1g63220. Plants were backcrossed and plants homozygous for the T-DNA insertion were identified by PCR. Homozygous mutants and wild type plants were challenged with Pseudomonas syringae pv. maculicola ES4326 and plants were assayed for amount of P. syringae bacteria accumulation 3 days post inoculation (Glazebrook et al., 1996) These experiments were repeated twice on at least six plants. Data are reported as means and standard deviations of the log of colony forming units per leaf cm². By three days after inoculation, the mutant plants accumulated more than 10 times as much bacteria as wild type plants (wt=3.94 log cfu/leaf disk std. 0.57, at1g63220=5.34 std. 0.63). Hence, At1g63220 contributes to disease resistance in A. thaliana. It is possible that the At1g63220 mutation inhibits defense responses that are dependent upon SGT1 interactions.

[0832] In addition, the bait fragment encoding amino acid 200-368 of OsSGT1 was found to interact with RNA-binding domain protein, PN23914. PN23914 is a 164-amino acid protein. A BLAST analysis of the amino acid sequence of this prey shows it has 35.9% sequence identity to tFZR1 from Oncorhynchus mykiss (GENBANK® Accession No. BAA25269). TFZR1 is an orphan nuclear receptor family member, tFZR1, which has a FTZ-F1 box. The amino acid sequences of the zinc finger domain and the FTZ-F1 box has 92.8% and 100% identity, respectively, with those of zebrafish FTZ-F1. On the other hand, the overall homology between tFZR1 and zebrafish FTZ-F1 is low (33.0%). The results indicate that tFZR1 is a new member of fushitarazu factor 1 (FTZ-F1) subfamily. It is possible that PN23914 shares functionality through the zing finger domain.

[0833] In addition, bait fragment encoding amino acid 200-368 of OsSGT1 was found to interact with proline rich protein, PN23221. A BLAST analysis of the amino acid sequence of PN23221 indicated that this prey protein is 40.3% similar to a rice repetitive proline rich protein (GENBANK® Accession No. AAL73214). Proline rich proteins can mediate interaction among proteins (Zhao et al., 2001). Note that proline rich protein PN23221 also interacts with shaggy kinase PN20621 and ring zinc finger protein-like PN20115 (see Table 28). Thus, the proline rich protein PN23221 can serve to bring these proteins together with OsSGT1.

[0834] The bait fragment encoding amino acid 200-368 of OsSGT1 was also found to interact with OsSGT1. In other words, OsSGT1 interacts with itself. Although the bait for OsSGT1 included amino acids 200-368, the prey included amino acids 9-227. Although OsSGT1 can be a self-regulator through aggregation, these bait and prey domains can reflect natural protein folding of a single native OsSGT1 protein.

[0835] Additionally, the bait fragment encoding amino acid 200-368 of OsSGT1 was found to interact with an auxin-induced protein like protein, PN24061. A BLAST analysis against the public database indicated that PN24061 is 63.5% similar to a rice putative IAA protein (GENBANK® Accession No. CAC80823). Indole acetic acid (IAA) is a plant growth hormone and is classified as an auxin. IAA is associated with a variety of physiological processes, including apical dominance, tropisms, shoot elongation, induction of cambial cell division and root initiation. Thus, genes that are induced by IAA likely produce proteins that are responding developmental changes. This associated goes hand in hand with regulation of cell division by interaction with SGT1.

[0836] The bait fragment encoding amino acid 200-368 of OsSGT1 was also found to interact with Ras GTPase, PN24063. A BLAST analysis of the amino acid sequence of PN24063 determined that this protein is ras-related GTP binding protein possessing GTPase activity (GENBANK® Accession No. P40392). This protein has four conserved regions involved in GTP binding and hydrolysis which are characteristic in the ras and ras-related small GTP-binding protein genes. In addition, two consecutive cysteine residues near the carboxyl-terminal end required for membrane anchoring are also present. This protein synthesized in Escherichia coli possessed GTPase activity (i.e., hydrolysis of GTP to GDP; Kidou et al., 1993). Ras GTPases are likely involved in signaling processes for development. ORFX from tomato that is expressed early in floral development, controls carpel cell number, and has a sequence suggesting structural similarity to the human oncogene c-H-ras p21 (fw2.2: a quantitative trait locus key to the evolution of tomato fruit size; Frary et al., 2000). The Rho family of GTPases are also involved in control of cell morphology, and are also thought to mediate signals from cell membrane receptors (Winge et al., 1997).

[0837] An A. thaliana homologue to PN24063 was identified by BLAST. At1g02130 shares 90% amino acid similarity with PN24063. To see if Arabidopsis homologues of PN24063 have roles in disease resistance Arabidopsis thaliana with T-DNA insertions in At1g02130 (line SAIL_{—}680_D03) was identified from a random insertion seed library. DNA regions surrounding the insertions were sequenced and revealed that the T-DNAs were located within the promoter of At1g02130. Plants were backcrossed and plants homozygous for the T-DNA insertion were identified by PCR. Homozygous mutants and wild type plants were challenged with Pseudomonas syringae pv. maculicola ES4326 and plants were assayed for amount of P. syringae bacteria accumulation 3 days post inoculation (Glazebrook et al., 1996). These experiments were repeated twice on at least six plants. Data are reported as means and standard deviations of the log of colony forming units per leaf cm². By three days after inoculation, the mutant plants accumulated more than 10 times as much bacteria as wild type plants (wt=3.93 log cfu/leaf disk std. 0.57, at1g02130=5.22 std. 0.9). Hence, At1g02130 contributes to disease resistance in A. thaliana. It is possible that the At1g02130 mutation inhibits defense responses that are dependent upon SGT1 interactions.

[0838] The bait fragment encoding amino acid 200-368 of OsSGT1 was found to interact with Archain delta COP, PN28982. A BLAST analysis of the amino acid sequence of PN28982 indicated that this prey protein is 92% similar to rice archain delta COP (GENBANK® Accession No. P49661). Cytosolic coat proteins that bind reversibly to membranes have a central function in membrane transport within the secretory pathway. One well-studied example is COPI or coatomer, a heptameric protein complex that is recruited to membranes by the GTP-binding protein Arf1. Assembly into an electron-dense coat then helps in budding off membrane to be transported between the endoplasmic reticulum (ER) and Golgi apparatus. Activated Arf1 brings coatomer to membranes. However, once associated with membranes, Arf1 and coatomer have different residence times: coatomer remains on membranes after Arf1-GTP has been hydrolysed and dissociated. Rapid membrane binding and dissociation of coatomer and Arf1 occur stochastically, even without vesicle budding. This continuous activity of coatomer and Arf1 generates kinetically stable membrane domains that are connected to the formation of COPI-containing transport intermediates. This role for Arf1/coatomer might provide a model for investigating the behaviour of other coat protein systems within cells. (Presley et al., 2002). It is possible that this delta COP interacts with the OsSGT1 and a Ras GTPase to coordinate membrane transport for proteolytically processed proteins.

[0839] An A. thaliana homologue to PN28982 was identified by BLAST. At5g05010 shares 77% amino acid similarity with PN28982. To see if Arabidopsis homologues of PN28982 have roles in disease resistance Arabidopsis thaliana with T-DNA insertions in At5g05010 (line SAIL_{—}84_C10) was identified from a random insertion seed library. DNA regions surrounding the insertions were sequenced and revealed that the T-DNAs were located within the promoter of At5g05010. Plants were backcrossed and plants homozygous for the T-DNA insertion were identified by PCR. Homozygous mutants and wild type plants were challenged with Pseudomonas syringae pv. maculicola ES4326 and plants were assayed for amount of P. syringae bacteria accumulation 3 days post inoculation (Glazebrook et al., 1996). These experiments were repeated twice on at least six plants. Data are reported as means and standard deviations of the log of colony forming units per leaf cm². By three days after inoculation, the mutant plants accumulated more than 10 times as much bacteria as wild type plants (wt=3.93 log cfu/leaf disk std. 0.57, at5g05010=5.24 std. 0.52). Hence, At5g05010 contributes to disease resistance in A. thaliana. It is possible that the At5g05010 mutation inhibits defense responses that are dependent upon SGT1 interactions.

[0840] The bait fragment encoding amino acid 200-368 of OsSGT1 was found to interact with fibrillin-like protein, PN29042. A BLAST analysis of the amino acid sequence of OsPN29037 indicated that this prey protein is 75% similar to the potato fibrillin homolog CDSP34 precursor from chloroplasts (GENBANK® Accession No. T07825). Plastid lipid-associated proteins, also termed fibrillin/CDSP34 proteins, are known to accumulate in fibrillar-type chromoplasts such as those of ripening pepper fruit, and in leaf chloroplasts from Solanaceae plants under abiotic stress conditions. Further, substantially increased levels of fibrillin/CDSP34 proteins are shown in various dicotyledonous and monocotyledonous plants in response to water deficit. (Langenkamper et al., 2001) In water-stressed tomato plants, similar increases in the CDSP 34-related transcript amount were noticed in wild-type and ABA-deficient flacca mutant, but protein accumulation was observed only in wild-type, suggesting a posttranscriptional role of ABA in CDSP 34 synthesis regulation. Substantial increases in CDSP 34 transcript and protein abundances were also observed in potato plants subjected to high illumination. The CDSP 34 protein is proposed to play a structural role in stabilizing stromal lamellae thylakoids upon osmotic or oxidative stress. (Gillet et al., 1998).

[0841] A BLAST analysis comparing the nucleotide sequence of PN29042 against TMRI's GENECHIP® Rice Genome Array sequence database identified probeset OS011738 (100%) as the closest match. Gene expression experiments indicated that this gene is up-regulated by ABA treatment.

[0842] An A. thaliana homologue to PN29042 was identified by BLAST. At4g22240 shares 79% amino acid similarity with PN29042. To see if Arabidopsis homologues of PN29042 have roles in disease resistance Arabidopsis thaliana with T-DNA insertions in At4g22240 (line SAIL_{—}691_B11) was identified from a random insertion seed library. DNA regions surrounding the insertions were sequenced and revealed that the T-DNAs were located within exon 1 of At4g22240. Plants were backcrossed and plants homozygous for the T-DNA insertion were identified by PCR. Homozygous mutants and wild type plants were challenged with Pseudomonas syringae pv. maculicola ES4326 and plants were assayed for amount of P. syringae bacteria accumulation 3 days post inoculation (Glazebrook et al., 1996). These experiments were repeated twice on at least six plants. Data are reported as means and standard deviations of the log of colony forming units per leaf cm². By three days after inoculation, the mutant plants accumulated more than 10 times as much bacteria as wild type plants (wt=3.93 log cfu/leaf disk std. 0.57, at4g22240=5.21 std. 0.43). Hence, At4g22240 contributes to disease resistance in A. thaliana. It is possible that the At4g22240 mutation inhibits defense responses that are dependent upon SGT1 interactions.

[0843] Additionally, the bait fragment encoding amino acid 200-368 of OsSGT1 was found to interact with HSP70-like protein, PN23949. A BLAST analysis of the amino acid sequence of OsPN3949 indicated that this prey protein is 71% similar to the cucumber 70K heat shock protein found in chloroplasts (GENBANK® Accession No. T10248). Heat shock proteins (reviewed in Bierkens et al., 2000) are stress proteins that function as intracellular chaperones to facilitate protein folding/unfolding and assembly/disassembly. They are selectively expressed in plant cells in response to a range of stimuli, including heat and a variety of chemicals. As regulators, HSP proteins are thus part of the plant protective stress response. A BLAST analysis comparing the nucleotide sequence of PN23949 against TMRI's GENECHIP® Rice Genome Array sequence database identified probeset OS015016 (97%) as the closest match. Gene expression experiments indicated that this gene is down-regulated by herbicide and JA treatment.

Yeast Two-Hybrid Using OsERP (PN20696) as Bait

[0844] Next, one of the proteins found to interact with OsSGT1, namely the elicitor responsive protein PN20696 (GENBANK® Accession No. T50649; OsERP), was used as a bait. As shown in Table 27, the rice elicitor responsive protein PN20696 (GENBANK® Accession No. T50649; OsERP) was found to interact with a receptor-like protein kinase like protein, PN31085. A BLAST analysis of the amino acid sequence of OsPN31085 indicated that this prey protein is 48% similar to a rice receptor like protein kinase (GENBANK® Accession No. T04124). The receptor protein kinases include a large group of proteins and most contain a cytoplasmic protein kinase catalytic domain, a transmembrane region, and and/or an extracellular domain consisting of leucine-rich repeats, which are thought to interact with other macromolecules. Cell to cell communication is likely mediated by receptor kinases which have important roles in plant morphogenesis.

[0845] OsERP was also found to interact with pyruvate orthophosphate dikinase, PN20674. A BLAST analysis of the amino acid sequence of PN20674 indicates that this prey protein is 96% similar to rice pyruvate orthophosphate dikinase (GENBANK® Accession No. T02979). Pyruvate orthophosphate dikinase (PPDK) is known for its role in C4 photosynthesis but has no established function in C3 plants. Abscisic acid, PEG and submergence were found to markedly induce a protein of about 97 kDa, identified by microsequencing as PPDK, in rice roots (C3); One rice PPDK is ABA-induced protein from roots. Western blot analysis showed a PPDK induction in roots of rice seedlings during gradual drying, cold, high salt and mannitol treatment, indicating a water deficit response. PPDK was also induced in the roots and sheath of submerged rice seedlings, and in etiolated rice seedlings exposed to an oxygen-free N2 atmosphere, which indicated a low-oxygen stress response. None of the stress treatments induced PPDK protein accumulation in the lamina of green rice seedlings. Ppdk transcripts were found to accumulate in roots of submerged seedlings, concomitant with the induction of alcohol dehydrogenase 1. Low-oxygen stress triggered an increase in PPDK activity in roots and etiolated rice seedlings, accompanied by increases in phosphoenolpyruvate carboxylase and malate dehydrogenase activities. The results indicate that cytosolic PPDK is involved in a metabolic response to water deficit and low-oxygen stress in rice, an anoxia-tolerant species (Moons et al., 1998).

[0846] Additionally, OsERP was found to interact with gamma adaptin, PN24292. A BLAST analysis of the amino acid sequence of PN24292 indicated that this prey protein is 97% similar to the Arabidopsis gamma adaptin (GENBANK® Accession No. BAA78745). Eukaryotic vesicular transport requires the recognition of membranes through specific protein complexes. The heterotetrameric adaptor protein complexes 1, 2, and 3 (AP1/2/3) are composed of two large, one small, and one medium adaptin subunit. Large subunits of AP1/2/3 are homologous and two subunits of the heptameric coatomer I (COPI) complex belong to this gene family. In addition, all small subunits and the aminoterminal domain of the medium subunits of the heterotetramers are homologous to each other; this also holds for two corresponding subunits of the COPI complex. AP1/2/3 and a substructure (heterotetrameric, F—COPI subcomplex) of the heptameric COPI have a common ancestral complex (called pre-F—COPI). Since all large and all small/medium subunits share sequence similarity, the ancestor of this complex is inferred to have been a heterodimer composed of one large and one small subunit. (Schledzewski et al., 1999). An archain delta COP interacts with OsSGT1 which interacts with the Gamma adaptin bait ERP.

[0847] OsERP was also found to interact with xanthine dehydrogenase, PN29997. A BLAST analysis of the amino acid sequence of PN29997 indicated that this prey protein is 66% similar to the Arabidopsis xanthine dehydrogenase (GENBANK® Accession No. NP_{—}195215). Xanthine dehydrogenase is the enzyme responsible for xanthine degradation. Xanthine dehydrogenase is involved in purine catabolism and stress reactions. A BLAST analysis comparing the nucleotide sequence of PN29997 against TMRI's GENECHIP® Rice Genome Array sequence database identified probeset OS013724 (100%) as the closest match. Gene expression experiments indicated that this gene is expressed in seeds.

[0848] OsERP was also found to interact with ubiquitin specific protease, PN30843. A BLAST analysis of the amino acid sequence of PN30843 indicated that this prey protein is 40% similar to an Arabidopsis ubiquitin specific protease (GENBANK® Accession No. AAG42761). The ubiquitin/26S proteasome pathway is a major route for selectively degrading cytoplasmic and nuclear proteins in eukaryotes. In this pathway, chains of ubiquitins become attached to short-lived proteins, signaling recognition and breakdown of the modified protein by the 26S proteasome. During or following target degradation, the attached multi-ubiquitin chains are released and subsequently disassembled by ubiquitin-specific proteases (UBPs) to regenerate free ubiquitin monomers for re-use. T-DNA insertion mutations in an Arabidopsis ubiquitin protease cause an embryonic lethal phenotype, with the homozygous embryos arresting at the globular stage. The arrested seeds have substantially increased levels of multi-ubiquitin chains, indicative of a defect in ubiquitin recycling. Thus, there is essential role for the ubiquitin/26S proteasome pathway in general and for AtUBP14 in particular during early plant development (Doelling et al., 2001). SGT1 also interacts with components of the ubiquitin/26S proteasome pathway and the ERP that interacts with this ubiquitin specific protease interacts with OsSGT. This protease can be have roles in disease resistance as well as development.

[0849] OsERP was also found to interact with pectinesterase, PN30845. A BLAST analysis of the amino acid sequence of PN30845 indicated that this prey protein is 71% similar to a rice pectinesterase (GENBANK® Accession No. BAB64824). Pectinesterases catalyse the esterification of cell wall polygalacturonans. In dicot plants, these ubiquitous cell wall enzymes are involved in important developmental processes including cellular adhesion and stem elongation. A BLAST analysis comparing the nucleotide sequence of PN30845 against TMRI's GENECHIP® Rice Genome Array sequence database identified probeset OS007057 (99%) as the closest match. Gene expression experiments indicated that this gene is up-regulated as a result of JA treatment, high saline growth conditions and herbicide treatment.

[0850] OsERP was also found to interact with several proteins, namely PN30870, PN29984, PN30844, PN29983, PN30868 and PN30857. A BLAST analysis of the amino acid sequence of PN30870, PN29984, PN30844, PN29983, PN30868 and PN30857 indicates that these prey proteins have no sufficient homology to any other characterized proteins. However, based on association with the rice elicitor responsive protein PN20696, these proteins can have roles in disease resistance or cell cycling.

[0851] A BLAST analysis comparing the nucleotide sequence of PN30857 against TMRI's GENECHIP® Rice Genome Array sequence database identified probeset OS008661.1 (99%) as the closest match. Gene expression experiments indicated that this gene is up-regulated as a result of blast infection.

[0852] An A. thaliana homologue to PN29983 was identified by BLAST. At2g36950 shares 52% amino acid similarity with PN29983. To see if Arabidopsis homologues of PN29983 have roles in disease resistance, Arabidopsis thaliana with T-DNA insertions in At2g36950 (line SAIL_{—}779_E11) was identified from a random insertion seed library. DNA regions surrounding the insertions were sequenced and revealed that the T-DNAs were located within exon 3 of At2g36950. Plants were backcrossed and plants homozygous for the T-DNA insertion were identified by PCR. Homozygous mutants and wild type plants were challenged with Pseudomonas syringae pv. maculicola ES4326 and plants were assayed for amount of P. syringae bacteria accumulation 3 days post inoculation (Glazebrook et al., 1996). These experiments were repeated twice on at least six plants. Data are reported as means and standard deviations of the log of colony forming units per leaf cm². By three days after inoculation, the mutant plants accumulated more than 10 times as much bacteria as wild type plants (wt=3.94 log cfu/leaf disk std. 0.57, at2g3695q=5.95 std. 0.72). Hence, At2g36950 contributes to disease resistance in A. thaliana. It is possible that the At2g36950 mutation inhibits defense responses that are dependent upon ERP/SGT1 interactions.

[0853] It should be noted that the all of the following bait proteins, namely OsSGT, ring zinc finger, PN20115, and shaggy kinase, PN20621, identified proline rich protein, PN23221, as their prey. OsSGT and PN23221 have been described earlier in this Example.

[0854] A BLAST analysis of the amino acid sequence of ring zinc finger PN20115 indicated that this bait protein is 65% similar to A. thaliana ring zinc finger protein At1g63170. The RING domain is a conserved zinc finger motif, which serves as a protein-protein interaction interface. This protein can interact with other proteins to control developmental or stress tolerance processes. A BLAST analysis comparing the nucleotide sequence of PN20115 against TMRI's GENECHIP® Rice Genome Array sequence database identified probeset OS015830 (90%) as the closest match. Gene expression experiments indicated that this gene is up-regulated as a result of conditions of drought.

[0855] A BLAST analysis of the amino acid sequence of shaggy kinase PN20621 indicated that this bait protein is the rice shaggy kinase (gi|13677093). GSK3/SHAGGY is a highly conserved serine/threonine kinase implicated in many signaling pathways in eukaryotes. Many GSK3/SHAGGY-like kinases have been identified in plants. The Arabidopsis BRASSINOSTEROID-INSENSITIVE 2 (BIN2) gene encodes a GSK3/SHAGGY-like kinase. Gain-of-function mutations within its coding sequence or its overexpression inhibit brassinosteroid (BR) signaling, resulting in plants that resemble BR-deficient and BR-response mutants. In contrast, reduced BIN2 expression via cosuppression partially rescues a weak BR-signaling mutation. Thus, BIN2 acts as a negative regulator to control steroid signaling in plants (Li & Nam, 2002).

Summary

[0856] As one of the major human staples, rice has been a target of genetic engineering for higher yields and resistance to diseases, pests, and environmental stresses of various kinds. The proteins identified in the present Example have presumed roles in cell cycle processes and/or the stress response. Knowledge of the proteins and molecular interactions associated with cell cycle processes and stress response in rice could lead to important applications in agriculture. Modulation of these interactions can be exploited to effect changes in plant development or growth that would result in increased crop yield and tolerance to environmental stress conditions.

[0857] Plant disease response often mimics certain normal developmental processes. For example, plants responses to fungal gibberellic acid and fusicoccin toxin are similar to responses to plant-produced gibberellin and auxin, respectively (Hedden & Kamiya, 1977; Baunsgaard et al., 1998). The same can be said for abiotic stress responses and certain stages of plant development. Leaf cells undergoing dehydration stress express some of the same genes that embryonic cells express during development or seed desiccation (Medina et-al., 2001). Since systematic regulation of gene expression drives developmental processes and stress responses (Chen et al., 2002) it is likely that there is a broader overlapping set of genes and their cognate proteins involved in such responses. This Example describes one such overlapping set of genes.

[0858] The results described in this Example are useful for predicting gene function in rice or other plants. For example, rice has a homolog (OsSGT1; GENBANK® Accession No. AAF18438) to the barley SGT1 and A. thaliana SGT1b proteins that participate in pathogen defense through interactions with resistance gene and ubiquitinylation protein degradation pathways. OsSGT1 is inducible by blast infection and likely participates in pathogen defense. OsSGT1 interacted with several undefined and known proteins, including one whose transcript is induced upon treatment with a rice blast fungal elicitor (GENBANK® Accession No. AF090698). The elicitor-responsive protein (OsERP) interacted with other undefined proteins and an ubiquitin protease-related protein, which implicates OsERP in SGT1 mediated protein degradation. These rice proteins, as well as other plant homologs, are suspected to have associated roles in disease resistance.

[0859] A. thaliana proteins homologous to OsERP (PN20696), Ras GTPase (PN24063), Archain delta COP-like (28982), fibrillin-like (PN29042) and to one of the undefined proteins that interacted with OsERP (PN29983) have also been identified. A. thaliana homozygous for insertion mutations in the cognate genes were challenged with Pseudomonas syringae. By three days after inoculation, the mutant plants accumulated more than 10 times as many bacteria as wild type plants. Hence, these Arabidopsis homologs contribute to disease resistance in A. thaliana. It is possible that these mutations inhibit defense responses that are dependent upon SGT1 interactions. Based upon homology and the interaction map, the rice homologs from which are associated the Arabidopsis genes can also involved in disease resistance and other processes utilizing SGT1 as a factor. These results demonstrate that the combined datasets can be used to predict gene functions that can be verified using phenotypes of mutants.

### Example VIII

[0860] This Example describes the identification and characterization of rice proteins that interact at the cell wall in response to biotic stress. As has been described above, an automated, high-throughput yeast two-hybrid assay technology was used to identify proteins interacting with rice chitinase, class III, and with cellulose synthase catalytic subunit. The sequences encoding the protein fragments used in the search were then compared by BLAST analysis against proprietary and public databases to determine the sequences of the full-length genes. The proteins found appear to be localized or targeted to the cell wall and to participate in the plant pathogen-induced defense response. The identification and characterization of proteins participating in pathways and biochemical reactions associated with defense against pathogens in rice can allow the development of genetically modified crops with enhanced or reduced disease resistance.

[0861] Chitinases are glycohydrolases that degrade chitin, a structural component of insects and plant pathogens such as nematodes, fungi, and bacteria. These enzymes are involved in multiple biological functions that include defense against chitin-containing pathogens, with class ill chitinases having a substrate specificity for bacterial cell walls (Brunner et al., 1998). Chitinase was chosen as a bait for these interaction studies based on its relevance to TMRI's plant health programs. The high potential for specific enzyme-substrate interactions makes these proteins suitable for two-hybrid assays. The identification of rice genes encoding proteins involved in the plant response to pathogens are important to agriculture, as their discovery can allow genetic manipulation of crops to obtain plants with enhanced or reduced disease resistance.

[0862] The second bait used in this Example, namely cellulose synthase catalytic subunit, is part of a membrane-bound enzyme complex involved in the synthesis of cellulose, an essential component of the cell wall of higher plants whose production is central to morphogenesis and many other biological processes in plants (reviewed in Perrin, 2001).

[0863] This example provides newly characterized rice proteins interacting with a rice chitinase, class III (OsCHIB1), and with rice cellulose synthase catalytic subunit, RSW1-like (OsCS). An automated, high-throughput yeast two-hybrid assay technology (provided by Myriad Genetics Inc., Salt Lake City, Utah, United States of America) was used to search for protein interactions with the chitinase and cellulose synthase bait proteins.

Results

[0864] Chitinase, class III, was found to interact with rice catalase A, an antioxidant enzyme that is part of the plant's detoxification mechanism against molecules induced in response to environmental stresses. A second interactor, cellulose synthase catalytic subunit, is an enzyme involved in cellulose biosynthesis and is the second bait protein of this Example. The search also identified four novel rice proteins interacting with chitinase: a protein similar to plant ABC transporter proteins, which play an important role in defense responses by eliminating toxins from tissues; a peptidase similar to Arabidopsis thaliana glutamyl aminopeptidase, whose proteolitic activity can be associated with activation of signaling molecules during the response of the plant to pathogens; a protein similar to a putative ATPase from A. thaliana, and one unknown protein, similar to a putative protein from A. thaliana.

[0865] The cellulose synthase catalytic subunit bait clone was found to interact with itself and with twelve proteins. These include three known rice proteins: the DNAJ homologue, a type of molecule known to participate in the plant protective stress response as a regulator of heat shock proteins, and two proteins that function as membrane-spanning pumps: the product of the salT gene, which is induced by salt and stress, and the channel protein aquaporin. Nine interactors are novel proteins: a DNA-damage inducible-like protein with a putative role in the plant defense mechanism against nucleic acid damage; a putative BAG protein which presumably participates in the plant stress response by regulating heat shock proteins; a protein similar to the riboflavin precursor 6,7-dimethyl-8-ribityllumazine synthase precursor from A. thaliana and possibly involved in biosynthesis of riboflavin during oxidative stress; a protein similar to soybean calcium-dependent protein kinase and one similar to A. thaliana putative zinc finger protein, with likely roles as mediators of molecular signaling or transcription following damage to the cell wall; and four proteins of unknown function.

[0866] The interacting proteins of the Example are listed in Table 29 and Table 30 below, followed by detailed information on each protein and a discussion of the significance of the interactions. A diagram of the interactions is provided in FIG. 5. The nucleotide and amino acid sequences of the proteins of the Example are provided in SEQ ID NOs: 151-176 and 317-328.

[0867] Some of the proteins identified represent rice proteins previously uncharacterized. These proteins appear to participate in the plant defense mechanism against pathogens. Based on their presumed biological function and on their ability to specifically interact with the chitinase and cellulose synthase bait proteins, the interacting proteins can be localized or targeted to the cell wall, where they are involved in biochemical reactions and gene induction associated with local or systemic defense against pathogens.

TABLE 29
Interacting Proteins Identified for OsCHIB1 (Chitinase, Class III)
The names of the clones of the proteins used as baits and found as preys are given.
Nucleotide/protein sequence accession numbers for the proteins of the Example (or related
proteins) are shown in parentheses under the protein name. The bait and prey coordinates
(Coord) are the amino acids encoded by the bait fragment(s) used in the search and by the
interacting prey clone(s), respectively. The source is the library from which each prey clone
was retrieved.

| | | | |
|---|---|---|---|
| | Protein Name | | Prey Coord |
| Gene Name | (GENBANK ® Accession No.) | Bait Coord | (Source) |

BAIT PROTEIN

| | |
|---|---|
| OsCHIB1 | O. sativa Chitinase, Class III |
| PN19651 | (AF296279; AAG02504) |
| (SEQ ID NO: 318) | |

INTERACTORS

| | | | |
|---|---|---|---|
| OsCATA | O. sativa Catalase A Isozyme | 10-200 | 332-433 |
| PN20899 | (D29966; BAA06232) | | (input trait) |
| (SEQ ID NO: 320) | | | |
| OsCS* | O. sativa Cellulose Synthase | 10-200 | 411-489 |
| PN19707 | Catalytic Subunit, RSW1-Like | | (input trait) |
| (SEQ ID NO: 322) | (AF030052; AAC39333) | | |
| OsPN22823 | Novel Protein PN22823, Similar | 10-200 | 25-106 |
| (SEQ ID NO: 152) | to ABC Transporter Proteins | | (input trait) |
| | (T02187, AB043999.1, | | |
| | NP_171753; e = 0) | | |
| OsPN22154 | Novel Protein PN22154, Similar | 10-200 | 390-562 |
| (SEQ ID NO: 154) | to A. thaliana Glutamyl | | (input trait) |
| | Aminopeptidase | | |
| | (AL035525; e = 0) | | |
| OsPN29041 | Novel Protein PN29041, | 10-200 | 2x 5-108 |
| (SEQ ID NO: 156) | Fragment, Similar to A. thaliana | | (input trait) |
| | Putative ATPase | | |
| | (AAG52137; e⁻¹⁷) | | |
| OsPN22020 | Novel Protein PN22020, | 10-200 | 3x 76-170 |
| (FL_R01_P005_C09.g.1a.Sp6a) | Fragment, Similar to A. thaliana | | 128-170 |
| (SEQ ID NO: 158) | Putative Protein (NP_197783; 3e⁻³⁴) | | (input trait) |

*The cellulose synthase catalytic subunit was also used as a bait; its interactions are shown in Table 30.

[0868] TABLE 30
Interacting Proteins Identified for OsCS
(Cellulose Synthase Catalytic Subunit, RSW1-Like)

| | | | |
|---|---|---|---|
| | Protein Name | | Prey Coord |
| Gene Name | (GENBANK ® Accession No.) | Bait Coord | (Source) |

BAIT PROTEIN

| | |
|---|---|
| OsCS | O. sativa Cellulose Synthase Catalytic |
| PN19707 | Subunit, RSW1-Like |
| (SEQ ID NO: | (AF030052; AAC39333) |
| 322) | |

INTERACTORS

| | | | |
|---|---|---|---|
| OsCS | O. sativa Cellulose Synthase Catalytic | 316-583 | 316-582 |
| PN19707 | Subunit, RSW1-Like | | (input trait) |
| (SEQ ID NO: | (AF030052; AAC39333) | | |
| 322) | | | |
| OsAAB53810 | O. sativa salT Gene Product | 316-583 | 6-145 |
| PN29086 | (AF001395; AAB53810.1) | | (output trait) |
| (SEQ ID NO: | | | |
| 324) | | | |
| OsPIP2A | O. sativa Aquaporin | 316-583 | 123-290 |
| PN29098 | (AF062393) | | (output trait) |
| (SEQ ID NO: | | | |
| 326) | | | |
| OsPN22825 | Novel Protein PN22825, Fragment | 316-583 | 5-129 |
| (SEQ ID NO: | | | (input trait) |
| 160) | | | |
| OsPN29076 | Novel Protein PN29076, Fragment | 316-583 | 1-187 |
| (SEQ ID NO: | | | 43-388 |
| 162) | | | 122-304 |
| | | | (output trait) |
| OsPN29077 | Novel Protein PN29077, Fragment, Similar | 316-583 | 4 × 1-242 |
| (SEQ ID NO: | to A. thaliana DNA-Damage Inducible | | (output trait) |
| 164) | Protein DDI1-Like | | |
| | (BAB02792; 5e⁻⁹⁴) | | |
| OsPN29084 | Novel Protein PN29084, Fragment, Similar | 316-583 | 3 × 1-253 |
| (SEQ ID NO: | to Soybean (Glycine max) Calcium- | | (output trait) |
| 166) | Dependent Protein Kinase | | |
| | (A43713, 2e⁻⁷⁹) | | |
| OsPN29113 | O. sativa DNAJ Homologue | 316-583 | 1-92 |
| (SEQ ID NO: | (BAB70509.1) | | (output trait) |
| 328) | | | |
| OsPN29115 | Novel Protein PN29115, Fragment, Similar | 316-583 | 1-188 |
| (SEQ ID NO: | to A. thaliana 6,7-Dimethyl-8- | | (output trait) |
| 168) | Ribityllumazine Synthase Precursor | | |
| | (AAK93590, 6e⁻³⁷) | | |
| OsPN29116 | Novel Protein PN29116, Fragment | 316-583 | 1-169 |
| (SEQ ID NO: | | | (output trait) |
| 170) | | | |
| OsPN29117 | Novel Protein PN29117 | 316-583 | −7-151 |
| (FL_R01_P078_N1 | | | (output trait) |
| 1.fasta.contig1)* | | | |
| (SEQ ID NO: | | | |
| 172) | | | |
| OsPN29118 | Novel Protein PN29118, Fragment | 316-583 | 1-136 |
| (SEQ ID NO: | | | (output trait) |
| 174) | | | |
| OsPN29119 | Novel Protein PN29119, Fragment | 316-583 | −53 to 155 |
| (FL_R01_P084_P | | | (output trait) |
| 01.g.1a.Sp6a) | | | |
| (SEQ ID NO: | | | |
| 176) | | | |

*OsPN29117 also interacts with heat shock protein hsp70 (OsHSP70, PN20775): three prey clones of OsPN29117 (one encoding amino acids 11-160, two encoding amino acids 29-160) from the output trait library interacted with a clone (amino acids 138-360) of OsHSP70 used as bait.

Yeast Two-Hybrid Using OsCHIB1 (Chitinase, Class III) as Bait

[0869] The rice class III chitinase (GENBANK® Accession No. AF296279) is a 286-amino acid protein. Chitinases are glycohydrolases that degrade chitin. Chitin is a structural component of insects, nematodes, fungi, and bacteria. Chitinases are one of the several kinds of pathogenesis-related (PR) proteins induced in higher plants in response to infection by pathogens (reviewed in Stintzi et al., 1993). While chitinases perform multiple biological functions, the class III chitinases' substrate specificity for bacterial cell walls suggests a main role for these enzymes as defense proteins (Brunner et al., 1998). The enzyme directly attacks the pathogen by degrading the fungal or bacterial cell wall.

[0870] The bait fragment used in this search encodes amino acids 10 to 200 of OsCHIB1 (Chitinase, Class III). This region of the protein includes the active site of the enzyme (amino acids 127 to 135). There is no match for the gene encoding OsCHIB1 on TMRI's GENECHIP® Rice Genome Array.

[0871] OsCHIB1 (Chitinase, Class III) was found to interact with OsCATA. PN20899 (O. sativa Catalase A Isozyme; D29966; BAA06232). Catalase A (GENBANK® Accession No. D29966) is the product of the rice CatA gene, which was identified by Higo & Higo, 1996 as the homologue of the Cat-3 gene from Indian corn (Zea mays; GENBANK® Accession No. L05934). Both rice CatA and Z. mays Cat-3 genes belong to the monocot-specific group, one of three groups into which plant catalase genes have been classified based on their molecular evolution from a common ancestor (Guan & Scandalios, 1996). Rice catalase A contains 491 amino acids with two catalytic sites in position H65 and N138, and a heme binding-site in position Y348. The heme group is a cofactor for catalases' enzymatic activity. Higo & Higo, 1996, showed that the CatA gene is expressed at high levels in seeds during early development and also in young seedlings, and that this gene is induced by the herbicide paraquat, but not or only slightly by abscisic acid (ABA), wounding, salicylic acid, and hydrogen peroxide.

[0872] Catalases are stress-induced enzymes found in almost all aerobic organisms. They are part of the enzymatic detoxification mechanism against active oxygen species (AOS) in plant cells. AOS are induced in response to environmental stress and act as signaling molecules to activate multiple defense responses through induction of PR genes and of other signaling molecules (e.g., salicylic acid, SA), leading to increased stress tolerance (Lamb & Dixon, 1997). AOS, however, can also damage proteins, membrane lipids, DNA and other cellular components of the plant. The balance between these two diverging effects depends on the tight control of cellular levels of AOS, which is achieved through a diverse battery of oxidant scavengers. Among these antioxidant molecules, catalases protect plant cells from the toxic effects of the AOS precursor hydrogen peroxide generated in the oxidative burst by converting it to dioxygen and water (reviewed in Dat et al., 2001).

[0873] OsCHIB1 (Chitinase, Class III) was found to interact with 0. Sativa Cellulose Synthase Catalytic Subunit, RSW1-Like (OsCS; PN19707). The prey clone found in our search, retrieved from the input trait library, encodes amino acids 411 to 489 of rice cellulose synthase catalytic subunit. This region of the 583-amino acid protein is C-terminal to the transmembrane domains and is predicted by amino acid sequence analysis to be on the cytoplasmic side of the plasma membrane.

[0874] Cellulose synthase is a membrane-bound enzyme complex comprising multiple isoforms. Cellulose synthase catalytic subunit (GENBANK® Accession No. AF030052) is involved in the synthesis of cellulose, a polysaccharide that is an essential component of the cell wall of higher plants. Cellulose imparts mechanical properties to plants which determine plant growth and cell shape, and its production impacts many aspects of plant biology. Most plants synthesize cellulose at the plasma membrane through the activity of cellulose synthase. As part of a structure called the rosette, the enzyme extends nascent cellulose chains by adding a sugar nucleotide precursor, and these chains then assemble into microfibrils that align in the same direction on the surface of the plasma membrane. This process seems to depend on a precise organization and orientation of the rosette (Perrin, 2001). A mutation in the A. thaliana rsw1 gene that causes cellulose disassembly results in altered root morphogenesis (Baskin et al., 1992), indicating that proper cellulose synthesis is critical to plant development and morphology. Arioli et al., 1998 showed that the rsw1 gene in A. thaliana encodes a catalytic subunit of cellulose synthase. However, genetic and biochemical evidence now supports the concept that a family of genes encode the catalytic subunit of cellulose synthase in higher plants, with various members showing tissue-specific expression or being differentially expressed in response to various conditions. These topics are reviewed in Perrin, 2001. These authors indicate that the presence of many genes for the cellulose synthase catalytic subunit in plants suggests that multiple isoforms of cellulose synthase can be needed in the same cell for the formation of functional multimeric complexes, most likely dimers. In addition, many other polypeptides have been detected within the rosette whose identities have not been determined. Interaction studies aimed at identifying the proteins interacting with synthase can help elucidate the organization of the cellulose synthase rosette machinery and address some of the questions that still remain about the biosynthesis of cellulose. There is no match for the gene encoding OsCS on TMRI's GENECHIP® Rice Genome Array.

[0875] Cellulose synthase catalytic subunit was also used as a bait protein. Its interactors are shown in Table 30 and discussed in later in this Example.

[0876] OsCHIB1 (Chitinase, Class III) was found to interact with Protein PN22823, which is similar to ABC Transporter Proteins (OsPN22823). Protein PN22823 is a 1239-amino acid protein that includes ten predicted transmembrane domains (amino acids 45 to 61, 154 to 170, 174 to 190, 253 to 269, 295 to 311, 671 to 687, 715 to 731, 794 to 810, 818 to 834, and 933 to 949) and two ATP/GTP-binding site motifs A (P-loops) (amino acids 383 to 390 and 1031 to 1038). A BLAST analysis against the Genpept database indicated that PN22823 shares 55% identity with Japanese goldthread (Coptis japonica) CjMDR1 (GENBANK® Accession No. AB043999.1; e=0.0). CjMDR1 is a multidrug resistance gene expressed in the rhizome, where alkaloids are highly accumulated compared to other organs (Yazaki et al., 2001). Other proteins highly similar to PN22823 include A. thaliana putative ABC transporter (GENBANK® Accession No. T02187; e=0) and putative P-glycoprotein (GENBANK® Accession No. NP_{—}171753; e=0). These types of proteins contain ATP-binding cassettes (ABC) and belong to a family that includes P-glycoprotein (P-gp) and multidrug resistance-associated protein (MRP) 2 (reviewed by Fardel et al., 2001). ABC proteins are membrane-spanning proteins that transport a wide variety of compounds across biological membranes, including phospholipids, ions, peptides, steroids, polysaccharides, amino acids, organic anions, drugs and other xenobiotics.

[0877] In mammals, ABC transporters participate in the biliary elimination of exogenous compounds and xenobiotics, and their expression can be up-regulated by these toxins. The large number of ABC transporter protein family members identified in A. thaliana (129 according to Sanchez-Fernandez et al., 2001), suggests an important role for these proteins in plants. In agreement with this notion, ABC transporters were among the immediate early genes found to be up-regulated in a tropical japonica rice cultivar (Oryza sativa cv. Drew) in response to jasmonic acid, benzothiadiazole, and/or blast infection (Xiong et al., 2001b). This suggests that ABC proteins play a role in defense against toxins in plants as they do in mammals. Most of the ABC transporters characterized in plants to date have been localized in the vacuolar membrane and are considered to be involved in the intracellular sequestration of cytotoxins (reviewed in Leslie et al., 2001). Furthermore, plant ABC transporters appear to have a role equivalent to that of the mammalian ABC transporter in multidrug resistance, as shown in a study in which an ABC transporter protein was up-regulated in a Nicotiana plumbaginifolia cell culture following treatment with a close analog of the antifungal diterpene sclareol (Jasinski et al., 2001). MRP homologues isolated from A. thaliana (AtMRPs) are implicated in providing herbicide resistance to plants (Rea et al., 1998). There is also evidence that ABC transporter proteins act as hormone transporters as they do in mammals. Specifically, a mutation in one of the ABC transporters in A. thaliana, AtMRP5, results in decreased root growth and increased lateral root formation possibly due to the inability of the mutant AtMRP5 to act as an auxin conjugate transporter (Gaedeke et al., 2001).

[0878] A BLAST analysis comparing the nucleotide sequence of Novel Protein PN22823 against TMRI's GENECHIP® Rice Genome Array sequence database identified probeset OS_ORF012127_at (e⁻¹⁴⁵ expectation value) as the closest match. Gene expression experiments indicated that this gene is induced by the fungal pathogen M. grisea.

[0879] OsCHIB1 (Chitinase, Class III) was found to interact with protein PN22154, which is similar to A. thaliana Glutamyl Aminopeptidase (OsPN22154). OsPN22154 is a 173-amino acid protein fragment that is 65% identical to a protein from A. thaliana (GENBANK® Accession No. AL035525) described as a homologue of mouse aminopeptidase (GENBANK® Accession No. U35646). The cDNA sequence of the A. thaliana aminopeptidase-like protein and the rice genome sequence (as a template) were used to generate a rice DNA sequence coding for a protein of 874 amino acids, which is 54.7% identical to the A. thaliana aminopeptidase-like protein. Indeed, domain analysis of the novel rice protein detected a peptidase M1 domain (amino acids 17 to 402), and a zinc-binding domain (amino acids 311 to 320), suggesting that this protein is a metallo-aminopeptidase. It is unclear whether this protein is encoded by an orthologue or an analogue of the A. thaliana aminopeptidase-like gene. A BLAST analysis comparing the nucleotide sequence of Novel Protein PN22154 against TMRI's GENECHIP® Rice Genome Array sequence database identified probeset OS_{—}004263 at (4e⁻⁸³ expectation value) as the closest match. Gene expression experiments indicated that this gene is expressed in panicle.

[0880] OsCHIB1 (Chitinase, Class III) was found to interact with protein PN29041 (OsPN29041). A BLAST analysis indicated that this protein fragment is similar to putative ATPase from A. thaliana (GENBANK® Accession No. AAG52137; e⁻¹⁷). ATPases can be localized to the plasma membrane which is adjacent to the cell wall. There is no match for this gene on TMRI's GENECHIP® Rice Genome Array, and thus no gene expression data that would allow prediction of its function during stress or infection. It is possible that this protein can have no role in pathogen invasion. However, it is part of the chitinase multiprotein complex identified in this Example through the yeast two-hybrid interactions, which we suggest exists at the cell wall interface. One hypothesis is that the ATPase-like protein can reside in the plasma membrane and participate in cell wall synthesis. Further interaction data can help elucidate the biological significance of its participation in the chitinase multiprotein complex.

[0881] OsCHIB1 (Chitinase, Class III) was found to interact with protein PN22020 (OsPN22020). Protein PN22020 is a 175-amino acid protein fragment that shares 55% identity with A. thaliana putative protein (GENBANK® Accession No. NP_{—}197783; 3e⁻³⁴). Analysis of the amino acid sequence identified a C2 domain (amino acids 5 to 90, e=0.037), as found in protein kinase C isozymes, which suggests that PN22020 can participate in signaling pathways similar to those modulated by protein kinase C. Perhaps its interaction with chitin represents a signaling event that occurs in response to pathogen or toxin exposure. However, this domain has been detected in other kinases and nonkinase proteins (Ponting & Parker, 1996). Identification of the full amino acid sequence of novel protein PN22020 can make it possible to determine the class of C2 domain-containing proteins to which it belongs.

[0882] A BLAST analysis comparing the nucleotide sequence of Novel Protein PN22020 against TMRI's GENECHIP® Rice Genome Array sequence database identified probeset OS008182_r_at (e⁻¹⁰² expectation value) as the closest match. Gene expression experiments indicated that this gene is constitutively expressed in leaves, stems, roots, seeds, panicle and pollen.

Yeast Two-Hybrid Using OsCS as Bait

[0883] A second bait, namely O. sativa Cellulose Synthase Catalytic Subunit, RSW1-Like (OsCS; PN19707; GENBANK® Accession No. AF030052), was also used. This protein is described earlier in this Example because it was found to interact with the bait protein O. sativa Chitinase, Class III (OsCHIB1; PN19651). The bait fragment used in the search encodes amino acids 316 to 583 of OsCS.

[0884] OsCS was found to interact with O. sativa Cellulose Synthase Catalytic Subunit, RSW1-like (OsCS). In other words, OsCS was found to interact with itself. The prey clone was retrieved from the input trait library, and encoded almost the same amino acids as the bait clone (the prey clone encoded amino acids 316 to 582). The self-interaction supports the concept of cellulose synthase acting as a dimer, as has been suggested (see Perrin, 2001)).

[0885] OsCS was also found to interact with O. sativa salT Gene Product (OsAAB53810). A BLAST analysis of the 145-amino acid protein OsAAB53810 amino acid sequence indicated that this protein is the rice salT Gene Product (GENBANK® Accession No. AAB53810.1; 100% identity; 3e⁻⁸⁰). This protein is encoded by a cDNA clone, salT, which was isolated from rice roots subjected to salinity stress, as reported by Claes et al., 1990. These authors showed that the salT mRNA is specifically expressed in sheaths and roots from mature plants and seedlings in response to salt stress and drought. Expression data reported previously by Garcia et al., 1998 indicate that expression of salT in each region of the plant is dependent on the metabolic activity of the cells as well as on whether or not they are responding to stress. These authors also found that the salT gene is induced by gibberellic acid and abscisic acid and suggest that induction by these growth regulators occurs through independent and possibly antagonistic pathways. Analysis of the OsAAB53810 protein sequence predicted a jacalin-like lectin domain (amino acids 14 to 145, 2.3e⁻³²). Jacalin interacts with carbohydrates in a highly specific manner (Sankaranarayanan et al., 1996).

[0886] OsCS was also found to interact with Aquaporin (OsPIP2a). Aquaporin (GENBANK® Accession No. AF062393) is a 290-amino acid protein that includes six predicted transmembrane domains (amino acids 48 to 64, 83 to 99, 131 to 147, 175 to 191, 207 to 223, and 254 to 270) and a Major Intrinsic Protein (MIP) family signature (amino acids 34 to 271), as determined by amino acid sequence analysis. The prey clone retrieved from the output trait library encodes amino acids 123 to 290 of OsPIP2a, a region that includes the four most C-terminal predicted transmembrane domains and part of the MIP family signature. Aquaporin is thought to be a plasma membrane intrinsic protein (Malz & Sauter, 1999). Such proteins facilitate movement of small molecules, often times functioning as water channels. This is why OsPIP2a is also called aquaporin. Malz and Sauter identified OsPIP2a along with OsPIP1a and report that these two proteins possess several hallmark motifs and homologies that justify their assignment to their respective PIP subfamilies. They report that OsPIP2a and OsPIP1a display similar, but not identical, expression patterns in rice, both being expressed at higher levels in seedlings than in adult plants, and that expression in the primary root is regulated by light. Furthermore, their study indicates that gibberellic acid also regulates the expression of these OsPIP transcripts in internodes of deepwater rice plants induced to grow rapidly by submergence, although expression did not correlate with growth. In A. thaliana, different PIP proteins are expressed in response to different agonists and conditions, e.g., salt stress induced tonoplast intrinsic protein (SITIP), as reported by Pih et al., 1999. These authors suggest that PIP proteins can be responsible for osmoregulation in plants under high osmotic stress such as a high salt condition.

[0887] OsCS was also found to interact with protein PN22825 (OsPN22825). OsPN22825 is a 229-amino acid protein fragment for which the complete sequence is not known. A BLAST analysis against the public and Myriad's proprietary databases indicated that OsPN22825 is similar to two unknown proteins from A. thaliana (GENBANK® Accession No. NP_{—}188565, 67% identity, 3e⁻⁸²; and GENBANK® Accession No. AB025624, 37% identity, 3e⁻⁸²). There is no match for the gene encoding OsPN22825 on TMRI's GENECHIP® Rice Genome Array, and thus no gene expression data that would allow prediction of its function during stress or infection.

[0888] OsCS was also found to interact with protein PN29076 (OsPN29076). OsPN29076 is a 389-amino acid protein fragment for which the complete sequence is not known. Analysis of the available amino acid sequence identified a cytochrome c family heme-binding site (amino acids 142 to 147). A BLAST analysis revealed no proteins with high similarity to OsPN29076, the best hit being an A. thaliana unknown protein (GENBANK® Accession No. AAF24616, 34% identity, 3e⁻⁴⁶). Three prey clones encoding amino acids 1 to 187, 42 to 389, and 121 to 304 of OsPN29076 were retrieved from the output trait library. The clones share an overlapping region which spans amino acids 121 to 187 of OsPN29076 and which includes the cytochrome c family heme-binding site. There is no match for the gene encoding OsPN29076 on TMRI's GENECHIP® Rice Genome Array, and thus no gene expression data that would allow prediction of its function during stress or infection. The lack of information about OsPN29076 makes it difficult to determine its function. Identification of the complete amino acid sequence for OsPN29076 can contribute to clarifying the function of this protein and the biological significance of the OsCS-OsPN29076 interaction.

[0889] OsCS was also found to interact with protein PN29077, which is similar to A. thaliana DNA-Damage Inducible Protein DDI1-Like (OsPN29077). OsPN29077 is 243-amino acid protein fragment for which the complete sequence is not known. A BLAST analysis indicated that OsPN29077 shares 73% identity with A. thaliana DNA-damage inducible protein DDI1-like (GENBANK® Accession No. BAB02792; 5e⁻⁹⁴). DDI1 is thought to be a cell-cycle checkpoint protein in yeast and its expression is induced by a variety of DNA-damaging agents. Such proteins arrest cells at certain stages and regulate the transcriptional response to DNA damage (Zhu & Xiao, 1998). DDI1 has been reported to interact with ubiquitin (Bertolaet et al., 2001), an observation that supports the use of the yeast two-hybrid approach to study such proteins.

[0890] A BLAST analysis comparing the nucleotide sequence of OsPN29077 against TMRI's GENECHIP® Rice Genome Array sequence database identified probeset OS016688.1_at (e⁻⁸³ expectation value) as the closest match. Gene expression experiments indicated that this gene is not specifically expressed in several different tissue types and is not specifically induced by a broad range of plant stresses, herbicides, and applied hormones.

[0891] OsCS was also found to interact with protein PN29084, which is similar to G. max calcium-dependent protein kinase (OsPN29084). OsPN29084 is a 284-amino acid protein fragment for which the complete sequence is not known. Analysis of the available amino acid sequence identified four EF-hand calcium-binding domains (amino acids 110 to 122, 146 to 158, 182 to 194, and 216 to 228). In agreement with the presence of these domains, a BLAST analysis indicated that OsPN29084 is highly similar to many calcium-dependent protein kinases including soybean (G. max) calcium-dependent protein kinase (GENBANK® Accession No. A43713, 81% identity, 2e⁻⁷⁹). This soybean protein also includes four EF-hand calcium-binding domains and requires calcium but not calmodulin or phospholipids for activity (Harper et al., 1991). Calcium can function as a second messenger through stimulation of such calcium-dependent protein kinases.

[0892] A BLAST analysis comparing the nucleotide sequence of OsPN29084 against TMRI's GENECHIP® Rice Genome Array sequence database identified probeset OS004083.1_at (e⁻⁸³ expectation value) as the closest match. Gene expression experiments indicated that this gene is not specifically expressed in several different tissue types and is not specifically induced by a broad range of plant stresses, herbicides, and applied hormones.

[0893] OsCS was also found to interact with O. sativa DNAJ homologue (OsPN29113). OsPN29113 is a 92-amino acid protein whose sequence includes an ATP/GTP-binding site motif A (P-loop, amino acids 43 to 50). A BLAST analysis of the available amino acid sequence indicated that OsPN29113 is the rice DNAJ homologue (GENBANK® Accession No. BAB70509.1; 100% identity; 5e⁻³⁹). In eukaryotic cells, DnaJ-like proteins regulate the chaperone (protein folding) function of Hsp70 heat-shock proteins through direct interaction of different Hsp70 and DnaJ-like protein pairs (Cyr et al., 1994). Heat shock proteins (reviewed in Bierkens et al., 2000) are stress proteins that function as intracellular chaperones to facilitate protein folding/unfolding and assembly/disassembly. They are selectively expressed in plant cells in response to a range of stimuli, including heat and a variety of chemicals. As regulators of heat shock proteins, DnaJ-like proteins are thus part of the plant protective stress response.

[0894] A BLAST analysis comparing the nucleotide sequence of OsPN29113 against TMRI's GENECHIP® Rice Genome Array sequence database identified probeset OS002926_at (e⁻¹²⁴ expectation value) as the closest match. Gene expression experimerits indicated that this gene is not specifically expressed in several different tissue types and is not specifically induced by a broad range of plant stresses, herbicides, and applied hormones.

[0895] OsCS was also found to interact with protein PN29115, which is similar to A. thaliana 6,7-dimethyl-8-ribityllumazine synthase precursor (OsPN29115). OsPN29115 is a 188-amino acid protein fragment for which the complete sequence is not known. The available sequence includes an ATP/GTP-binding site motif A (P-loop, amino acids 94 to 101) and a 6,7-dimethyl-8-ribityllumazine synthase family signature (amino acids 42 to 186), as determined by analysis of the available amino acid sequence. The presence of the latter domain is in agreement with the results of a BLAST analysis indicating that OsPN29115 shares 50% identity with A. thaliana putative 6,7-dimethyl-8-ribityllumazine synthase precursor (GENBANK® Accession No. AAK93590, 6e⁻³⁷). The cofactor riboflavin is synthesized from the precursor 6,7-dimethyl-8-ribityllumazine (Nielsen et al., 1986). Flavins are involved in numerous biological processes (reviewed by Massey, 2000). For example, they participate in electron transfer reactions and thereby contribute to oxidative stress through their ability to produce superoxide, but at the same time flavins participate in the reduction of hydroperoxides, the products of oxygen-derived radical reactions. Flavins also contribute to soil detoxification and are linked to light-induced DNA repair in plants. The chemical versatility of flavoproteins is controlled by specific interactions with the proteins with which they are bound.

[0896] A BLAST analysis comparing the nucleotide sequence of OsPN29115 against TMRI's GENECHIP® Rice Genome Array sequence database identified probeset OS015577_at (e⁻⁴¹ expectation value) as the closest match. Gene expression experiments indicated that this gene is not specifically expressed in several different tissue types and is not specifically induced by a broad range of plant stresses, herbicides, and applied hormones.

[0897] OsCS was also found to interact with protein PN29116 (OsPN29116). OsPN29116 is a 170-amino acid protein fragment for which the complete sequence is not known. Analysis of the available amino acid sequence identified a WD40 domain (amino acids 82 to 118), which is reported to participate in protein-protein interactions (Ajuh et al., 2001). A BLAST analysis indicated that OsPN29116 shares identity with two unknown proteins from A. thaliana (GENBANK® Accession No. T45879, 67% identity, e⁻⁶⁴; and GENBANK® Accession No. NP_{—}181253, 69% identity, e⁻⁵⁸). The lack of information about OsPN29116 makes it difficult to determine its function. Identification of the complete amino acid sequence for OsPN29116 can clarify the function of this protein and the biological relevance of the OsCSC-OsPN29116 interaction.

[0898] A BLAST analysis comparing the nucleotide sequence of OsPN29116 against TMRI's GENECHIP® Rice Genome Array sequence database identified probeset OS016500_r_at (e⁻¹² expectation value) as the closest match. The expectation value is too low for this probeset to be a reliable indicator of the gene expression of OsPN29116.

[0899] OsCS was also found to interact with protein PN29117 (OsPN29117). OsPN29117 is a 237-amino acid protein that includes a ubiquitin domain (amino acids 12 to 84). Analysis of the amino acid sequence identified a BAG domain (amino acids 106 to 187, 2.1e⁻¹¹), which is known to bind and regulate Hsp70/Hsc70 molecular chaperones (Briknarova et al., 2001). The BAG family of cochaperones functionally regulates signal-transducing proteins and transcription factors important for cell stress responses, apoptosis, proliferation, cell migration and hormone action (Briknarova et al., 2001; Antoku et al., 2001). A BLAST analysis indicated that OsPN29117 shares identity with an A. thaliana unknown protein (GENBANK® Accession No. AAC14405, 44% identity, 4e⁻⁵²). In agreement with the notion that OsPN29117 is a member of the BAG family of proteins, it was also found to interact with hsp70 (OsHSP70; see note * under Table 30). Heat shock proteins (discussed above) are stress proteins which function as ATP-dependent intracellular chaperones and which are selectively expressed in plant cells in response to a range of stimuli, including heat and a variety of chemicals. As a regulator of heat shock proteins, the BAG protein OsPN29117 can thus be part of the plant protective stress response.

[0900] The prey clone retrieved in the search encodes amino acids 1 to 151 of OsPN29117, a region that includes the ubiquitin domain. Note that the prey clone includes a small portion (−7 to 0) of the 5′ untranslated region, and thus its coordinates are shown in Table 2 as amino acids −7 to 151. A BLAST analysis comparing the nucleotide sequence of OsPN29117 against TMRI's GENECHIP® Rice Genome Array sequence database identified probeset OS017803_at (e⁻⁷³ expectation value) as the closest match. Gene expression experiments indicated that this gene is not specifically expressed in several different tissue types and is not specifically induced by a broad range of plant stresses, herbicides, and applied hormones.

[0901] OsCS was also found to interact with protein PN29118 (OsPN29118). OsPN29118 is a 136-amino acid protein fragment for which the complete sequence is not known. A BLAST analysis indicated that OsPN29118 has only weak similarity to proteins in the public domain and in Myriad's proprietary database, the best hit being an A. thaliana putative zinc finger protein SHI-like (GENBANK® Accession No. NP_{—}201436, 42% identity, 5e⁻¹⁵). The protein with the next highest identity is an A. thaliana hypothetical protein (GENBANK® Accession No. T04595, 38% identity, 9e⁻¹⁵). Discovery of the complete amino acid sequence for OsPN29118 can contribute to clarifying the function of this protein and the biological relevance of the OsCSC-OsPN29118 interaction.

[0902] A BLAST analysis comparing the nucleotide sequence of OsPN29118 against TMRI's GENECHIP® Rice Genome Array sequence database identified probeset OS004996.1_at (e⁻³⁸ expectation value) as the closest match. Gene expression experiments indicated that this gene is not specifically expressed in several different tissue types and is not specifically induced by a broad range of plant stresses, herbicides, and applied hormones.

[0903] OsCS was also found to interact with protein PN29119 (OsPN29119). OsPN29119 is a 327-amino acid protein fragment for which the complete sequence is not known. A BLAST analysis indicated that OsPN29119 shares 38% identity with an A. thaliana unknown protein, T17H3.9 (GENBANK® Accession No. AAD45997, 7e-⁵⁴). Discovery of the complete amino acid sequence for OsPN29119 can contribute to clarifying the function of this protein and the biological relevance of the OsCSC-OsPN29119 interaction. One prey clone encoding amino acids 1 to 155 of OsPN29119 was retrieved from the output trait library. This prey clone includes a portion of the 5′ untranslated region and thus its coordinates are shown in Table 2 as amino acids −53 to 155. A BLAST analysis comparing the nucleotide sequence of OsPN29119 against TMRI's GENECHIP® Rice Genome Array sequence database identified probeset OS014829.1_at (e⁻¹³¹ expectation value) as the closest match. Gene expression experiments indicated that this gene is not specifically expressed in several different tissue types and is not specifically induced by a broad range of plant stresses, herbicides, and applied hormones.

Summary

Proteins that Interact with OsCHIB1 (Chitinase. Class III)

[0904] The yeast two-hybrid assay designed to search for proteins interacting with the chitinase bait proteins led to the isolation of proteins that appear to be associated with the plant defense response to pathogens. Resistance to disease occurs on several levels that include local and nonspecific systemic responses. The hypersensitive response (HR) in plants is a mechanism of local resistance to pathogenic microbes characterized by a rapid and localized tissue collapse and cell death at the infection site, resulting in immobilization of the intruding pathogen. This process is triggered by pathogen elicitors and orchestrated by an oxidative burst, which occurs rapidly after the attack (Lamb & Dixon, 1997). The accumulation of active oxygen species (AOS) is a central theme during plant responses to both biotic and abiotic stresses. AOS are generated at the onset of the HR and might be instrumental in killing host tissue during the initial stages of infection. AOS also act as signaling molecules that induce expression of PR genes and production of other signaling molecules which participate in the signal cascade that leads to PR gene induction. The triggering of defense genes can extend to the uninfected tissues and the whole plant, leading to local resistance (LR) and systemic acquired resistance (SAR; reviewed in Martinez et al., 2000). As a result of SAR, other portions of the plant are provided with long-lasting protection against the same and unrelated pathogens.

[0905] Hydrogen peroxide from the oxidative burst plays an important role in the localized HR not only by driving the cross-linking of cell wall structural proteins, but also by triggering cell death in challenged cells and as a diffusible signal for the induction in adjacent cells of genes encoding cellular protectants such as glutathione S-transferase and glutathione peroxidase, and for the production of salicylic acid (SA). SA is thought to act as a signaling molecule in LR and SAR through generation of SA radicals, a likely by-product of the interaction of SA with catalases and peroxidases, as reported by Martinez et al., 2000. These authors showed that recognition of a bacterial pathogen by cotton triggers the oxidative burst that precedes the production of SA in cells undergoing the HR, and that hydrogen peroxide is required for local and systemic accumulation of SA, thus acting as the initiating signal for LR and SAR. The involvement of catalase in SA-mediated induction of SAR in plants was previously demonstrated by Chen et al., 1993 who showed that binding of catalase to SA results in inhibition of catalase activity, and that consequent accumulation of hydrogen peroxide induces expression of defense-related genes associated with SAR.

[0906] In this study, chitinase was found to interact with catalase A. Given the established role of chitinase as a defense protein, this interaction is consistent with the presence of the stress-induced catalase during pathogen attack and suggests that both enzymes can be located at the cell wall, where they participate in PR gene induction. The significance of the chitinase-catalase interaction as part of the defense response against microbes finds further support in the observation that fungal catalase has a role in protecting necrotrophic fungi from the deleterious effects of AOS during colonization of a host expressing the HR (Mayer et al., 2001). These organisms were shown to secrete catalase, among other enzymes, to remove or inactivate AOS from the host.

[0907] In addition, the cell wall can play a role in defense against bacterial and fungal pathogens by receiving information from the surface of the pathogen from molecules called elicitors, and by transmitting this information to the plasma membrane of plant cells, resulting in gene-activated processes that lead to resistance. One type of biochemical reaction induced by elicitors and associated with the hypersensitive response is the synthesis and accumulation of phytoalexins, antimicrobial compounds produced in the plant after fungal or bacterial infection (reviewed in Hammerschmidt, 1999). One of the proteins found to interact with chitinase is an ABC transporter. ABC transporters are known to sequester cytotoxins, metabolites and other molecules from plant tissues. It is thus likely that the ABC transporter found to interact with chitinase resides at the cell wall, where it participates in the transport of toxins. Though the function of phytoalexins in the plant defense response has not been thoroughly elucidated (Hammerschmidt, R., 1999), it is tempting to speculate that the ABC transporter can be involved in the elimination of these toxins from the plant cells during the plant pathogen-induced defense response. Furthermore, gene expression experiments indicated that the gene encoding the ABC transporter protein is induced by the fungal pathogen M. grisea. These results are consistent with the putative role of this protein in the defense response induced by pathogenic fungi and bacteria in rice.

[0908] Chitinase was also found to interact with novel protein PN22154 similar to A. thaliana glutamyl aminopeptidase. While the specific function of this prey protein has not been determined, it is well known that proteolytic activity is a common component of plant defense mechanisms against pathogens. These mechanisms include both chitinases and proteases. Peptidase activity has been associated with regulation of signaling. Carboxypeptidases, for instance, hydrolytically remove the pyroglutamyl group from peptide hormones, thereby activating these signaling molecules. A carboxypeptidase regulates Brassinosteroid-insensitive 1 (BRI1) signaling in A. thaliana by proteolytic processing of a protein (Li et al., 2001). Based on its ability to interact with chitinase and on the well-established role of the latter in PR defense, chitinase and novel protein PN22154 can interact as components of a complex with chitinolytic and proteolytic activities targeted against plant invaders, and that the rice glutamyl aminopeptidase-like protein can have a role in activating signaling molecules at the cell wall that are involved in the plant defense response.

[0909] A fourth interactor found for chitinase is cellulose synthase catalytic subunit. This enzyme acts as a complex at the plasma membrane where it participates in cell wall synthesis, and its regulation can allow the plant to respond with morphological changes to physical insult produced by pathogen attack. This interaction can be significant to maintaining the balance of the metabolism of cell wall components during the defense response. It is possible that either chitinase resides at the cell wall where it interacts with cellulose synthase immediately following pathogen attack, or chitinase is targeted to this site and interacts with synthase after PR gene induction.

[0910] Aside from novel proteins PN22020 and PN29041, the rice proteins found to interact with chitinase appear to be localized at or recruited to the cell wall where they participate in the plant defense response to pathogen attack. Two of the interactors, an ABC transporter and a glutamyl aminopeptidase-like protein, are newly characterized proteins in rice.

[0911] As a whole, all of these proteins can interact as a multicomponent complex at the cell wall interface in the plant cell, and all can have roles in controlling AOS levels, inducing PR genes, and synthesizing and maintaining the integrity of the cell wall to protect the plant against the effects of pathogen invasion.

Proteins that Interact with Cellulose Synthase Catalytic Subunit (OsCS)

[0912] The interactions involving OsCS expand the stress-response protein network identified for the chitinase bait protein. OsCS interacts with several proteins that appear to participate in the plant response to pathogen-induced stress at the cell wall. Published evidence links some of these proteins to the plant response to various stresses. These include aquaporin (OsPIP2a) and salt-stress induced protein (OsAAB53810), two molecules that, although they can not have a direct role in disease resistance, can function as membrane-spanning pumps in the protein complex at the cell wall to regulate turgor pressure or transmit solutes. Moreover, the presence of the jacalin-like lectin domain in OsAAB53810 is of particular interest in the context of its interaction with an enzyme that synthesizes carbohydrate chains. Given the carbohydrate-binding property of jacalin (Sankaranarayanan et al., 1996), OsAAB53810 can specifically bind nascent cellulose chains as they are produced by OsCS, thus playing an active role in OsCS-dependent events relating to cell wall metabolism. The fact that OsAAB53810 is induced by salt and stress supports a role for this protein in such physiological events.

[0913] Another interactor, the rice DNAJ homologue OsPN29113, likely participates in the plant protective stress response by regulating the chaperone function of heat shock proteins, which are induced by various forms of stress. It is possible that the interaction of the DNAJ protein with cellulose synthase is part of the plant response to chemicals produced by pathogens or generated in cells undergoing the HR, and that such response is associated with injury to the cell wall that has occurred in response to the stress.

[0914] Among the novel proteins found to interact with OsCS, OsPN29077 is similar to A. thaliana DNA-damage inducible protein DDI 1-like. Based on the expression of yeast DDI1 in response to DNA damage and on sequence homology, we speculate that OsPN29077 performs the same function as DDI1 and that the OsCS-OsPN29077 interaction is associated with the plant defense mechanism against DNA damage. Likewise, we attribute the BAG-like protein OsPN29117 a putative role in the plant protective stress response as a regulator of heat shock proteins. In agreement with this role, OsPN29117 also interacts with hsp70, which gene expression experiments indicate is expressed constitutively and is down-regulated by jasmonic acid, a component of plant defense response pathways. Since OsPN29077 and OsPN29117 interact with the cellulose synthase catalytic subunit, and the latter interacts with the pathogen-induced defense protein chitinase, these interactors can be a part of the same complex at the cell wall where they participate in the response to pathogen attack.

[0915] The novel protein OsPN29115 is similar to the riboflavin precursor 6,7-dimethyl-8-ribityllumazine synthase precursor from A. thaliana. Among the roles reported for riboflavin is its association with the redox reactions occurring as a result of oxidative stress (Massey, 2000). Based on this evidence and on sequence homology for the identified interactor, the OsCS-OsPN29115 interaction can link the plant response to stress and toxins produced by pathogens with structural changes requiring OsCS activity.

[0916] Additional novel proteins interacting with OsCS include a protein similar to soybean calcium-dependent protein kinase (OsPN29084) and a protein similar to A. thaliana putative zinc finger protein (OsPN29118). The similarities of these interactors to protein kinases and zinc finger proteins suggest that they function as mediators of molecular signaling and transcription, respectively. Their interactions with OsCS can represent signaling or transcriptional events occurring after disruption following damage to the cell wall by pathogens, and these prey proteins can move from the cell wall to other parts of the cell to mediate such events. The OsCS-OsPN29084 interaction likely represents a step in the transduction of an extracellular signal that results in a physiological response, while the OsCS-OsPN29118 interaction can be associated with transcriptional regulation also in response to an extracellular signal. This signal can be in the form of an insult to the plant produced by pathogen attack.

[0917] For the remaining proteins found to interact with OsCS-OsPN22825, OsPN29076, OsPN29116, and OsPN29119-based on their association with cellulose synthase and chitinase, these prey proteins can also be important factors for pathogen defense, cell wall integrity, or for holding together protein complexes.

[0918] Thus, the results presented in this Example show that proteins interacting with the cellulose synthase catalytic subunit are also part of the chitinase multiprotein complex localized at the cell wall interface.

### Example IX

[0919] Janssens & Goris teach that type 2A serine/threonine protein phosphatases (PP2A) are important regulators of signal transduction, which they affect by dephosphorylation of other proteins (Janssens & Goris, 2001). Members of the protein phosphatase 2A (PP2A) family of serine/threonine phosphatases contain a well-conserved catalytic subunit, the activity of which is highly regulated (Janssens and Goris, 2001). There are multiple PP2A isoforms in plants and other organisms, and they appear to be differentially expressed in various tissues and at different stages of development (Arino et al., 1993). Harris et al. cites a number of reports describing the association of PP2A subunits with a variety of cellular proteins in addition to regulatory subunits, suggesting that PP2As function as regulators of various signaling pathways associated with protein synthesis, cell cycle and apoptosis (Harris et al., 1999). PP2A enzymes have been implicated as mediators of a number of plant growth and developmental processes.

[0920] In addition, PP2A enzymes play a role in pathogen invasion. In animals, a variety of viral proteins target specific PP2A enzymes to deregulate chosen cellular pathways in the host and promote viral progeny (Sontag, 2001; Garcia et al., 2000). PP2A enzymes interact with many cellular and viral proteins, and these protein-protein interactions are critical to modulation of PP2A signaling (Sontag, 2001). The proteins interacting with PP2A (e.g., PP2A) can, for example, target PP2A to different subcellular compartments, or affect PP2A enzyme activity. Moreover, PP2A enzymes play a role in plants in their response to viral infection (Dunigan & Madlener, 1995). Indeed, serine/threonine protein phosphatase is required for tobacco mosaic virus-mediated programmed cell death (Dunigan & Madlener, 1995).

[0921] OsPP2A-2 (GENBANK® Accession No. AF134552) is a 308-amino acid subunit of a family of protein phosphatases that contains a serine/threonine protein phosphatase signature (amino acids 112 to 117).

[0922] As described above, a yeast two-hybrid approach was taken to dissect PP2A-mediated signaling events. The bait fragments used in this search and found to have interactors encode amino acids 1 to 308 and 150-308 of OsPP2A-2.

[0923] The second bait used in this Example, OsCAA90866, is a protein encoded by a complete cDNA sequence that is only known to be inducible by chilling in rice. OsCAA90866 was chosen as a bait for these interaction studies based on its relevance to abiotic stress. Investigation into the interactions involving OsCAA90866 will provide insight into the function of this poorly defined protein. The identification of rice genes involved in modulating the response of the plant to an environmental challenge, thus conferring it a selective advantage, would facilitate the generation and yield of crops resistant to abiotic stress.

Results

[0924] OsPP2A-2 was found to interact with rice putative proline-rich protein, which is possibly a transcriptional regulator, and with the seed storage protein glutelin. The search also identified five novel rice proteins interacting with OsPP2A-2: a putative PP2A regulatory subunit protein also similar to rice chilling-inducible protein CAA90866 (the second bait protein of this Example); an enzyme similar to phosphoribosylanthranilate transferase that is likely involved in the plant response to pathogen infection; a disulfide isomerase, with a putative role in protein folding; a voltage-dependent ion channel protein; and a DnaJ-like protein with a putative role in the pathogen-induced defense response.

[0925] The second bait protein of this Example, chilling-inducible protein CAA90866 was found to interact with itself and with six proteins. One of these is the same putative PP2A regulatory subunit protein (similar to the bait protein itself) found to interact with the bait OsPP2A-2 of described in this Example. This interaction links the two networks of proteins identified in this Example (i.e., links proteins associated with biotic and abiotic stress to phosphatases). The other interactors identified in this search include a 14-3-3-like protein that is induced under various abiotic stress conditions; a pyrrolidone carboxyl peptidase-like protein with a putative role in activating signaling peptides involved in the plant's response to cold stress; a novel protein containing an inositol phosphate domain likely involved in regulation of signaling events associated with cold tolerance; a novel rice homolog of wheat initiation factor (iso)4f p82 subunit with a putative role in RNA decay pathways associated with stress conditions; and a novel protein similar to plants 2-dehydro-3-deoxyphosphooctonate aldolase.

[0926] The interacting proteins of the Example are listed in Table 31 and Table 32 below, followed by detailed information on each protein and a discussion of the significance of the interactions. A diagram of the interactions is provided in FIG. 6. The nucleotide and amino acid sequences of the proteins of the Example are provided in SEQ ID NOs: 177-192 and 329-340.

[0927] Some of the proteins identified represent rice proteins previously uncharacterized. Based on their presumed biological function and on their ability to specifically interact with the bait proteins OsPP2A-2 or OsCAA90866, it appears that the proteins interacting with OsPP2A-2 represent a network involved in the rice defense response to biotic stress, and those interacting with OsCAA90866 are associated with the abiotic stress response. Importantly, the interactions identified suggest that phosphatases play a role in the regulation of both biotic and abiotic stress response in rice.

TABLE 31
Interacting Proteins Identified for OsPP2A-2
(Serine/Threonine Protein Phosphatase PP2A-2)

| | | | |
|---|---|---|---|
| | | | Prey |
| | Protein Name | | Coord |
| Gene Name | (GENBANK ® Accession No.) | Bait Coord | (Source) |

BAIT PROTEIN

| | |
|---|---|
| OsPP2A-2 | O. sativa Serine/Threonine Protein |
| PN20254 (AF134552- | Phosphatase PP2A-2, Catalytic |
| OS002763) | Subunit |
| (SEQ ID NO: 330) | (AF134552, AAD22116) |

INTERACTORS

| | | | |
|---|---|---|---|
| OsAAK63900 | O. sativa Putative Proline-Rich | 1-308 | 122-224 |
| PN23266 | Protein AAK63900 (AC084884) | | (input trait) |
| (SEQ ID NO: 332) | | | |
| OsORF020300-2233.2 | Hypothetical Protein ORF020300- | 1-308 | 93-387 |
| PN21639 (2233(2)-OS- | 2233.2, Putative PP2A Regulatory | | 118-388 |
| ORF020300 novel | Subunit, Similar to OsCAA90866 | | (input trait) |
| (SEQ ID NO: 178) | (AAD39930; 5e⁻⁹²) | | |
| | (CAA90866; 5e⁻⁵³) | | |
| OsPN23268 | Novel Protein 23268, Similar to | 1-308 | 2 × 12-200 |
| PN23268 novel | Phosphoribosylanthranilate | | (input trait) |
| (SEQ ID NO: 180) | Transferase, Chloroplast Precursor, | | |
| | Fragment | | |
| | (AAB02913.1; 5e⁻⁹⁵) | | |
| OsCAA33838 | O. sativa Glutelin CAA33838 | 150-308 | 5-155 |
| PN24775 | (X15833) | | (output |
| (SEQ ID NO: 334) | | | trait) |
| OsPN26645 | Novel Protein PN26645, Putative | 1-308 | 24-164 |
| (Contig3412.fasta.Contig1 | Protein Disulfide Isomerase-Related | | (input trait) |
| novel) | Protein Precursor | | |
| (SEQ ID NO: 182) | (BAB09470.1; e⁻²⁸) | | |
| OsPN24162 | Novel Protein PN24162, Porin-like, | 150-308 | 28-164 |
| (Contig3453.fasta.Contig1 | Voltage-Dependent Anion Channel | | (output |
| novel | Protein (NP_201551; 3e⁻⁸⁶) | | trait) |
| (SEQ ID NO: 184) | | | |
| Os011994-D16 PN20618 | Hypothetical Protein 011994-D16, | 150-308 | 99-368 |
| (FL_R01_P028_D16OS01 | Similar to Z. mays DnaJ protein | | (output |
| 1994 novel | (T01643; e = 0) | | trait) |
| (SEQ ID NO: 186) | | | |

The names of the clones of the proteins used as baits and found as preys are given. Nucleotide/protein sequence accession numbers for the proteins of the Example (or related proteins) are shown in parentheses under the protein name. The bait and prey coordinates (Coord) are the amino acids encoded by the bait fragment(s) used in the search and by the interacting prey clone(s), respectively. The source is the library from which each prey clone was retrieved.

[0928] TABLE 32
Interacting Proteins Identified for OsCAA90866
(O. sativa Chilling-Inducible Protein CAA90866)

| | | | |
|---|---|---|---|
| | Protein Name | | |
| | (GENBANK ® Accession | | Prey Coord |
| Gene Name | No.) | Bait Coord | (Source) |

BAIT PROTEIN

| | |
|---|---|
| OsCAA90866 | O. sativa Chilling-Inducible |
| PN20311 | Protein CAA90866 |
| (984756_OS015052) | (Z54153, CAA90866) |
| (SEQ ID NO: 336) | |

INTERACTORS

| | | | |
|---|---|---|---|
| OsCAA90866 | O. sativa Chilling-Inducible | 100-250 | 1-126 |
| PN20311 | Protein CAA90866 | | (output trait) |
| (SEQ ID NO: 336) | (Z54153, CAA90866) | | |
| Os008938-3209 | O. sativa Putative 14-3-3 | 100-250 | 4 × 53-259 |
| PN20215 (3209-OS208938) | Protein | | (input trait) |
| (SEQ ID NO: 338) | (AAK38492) | | |
| OsAAG46136 | O. sativa Putative Pyrrolidone | 100-250 | 2 × 92-222 |
| PN23186 | Carboxyl Peptidase | | (input trait) |
| (SEQ ID NO: 340) | (AAG46136) | | |
| OsORF020300-2233.2 | Hypothetical Protein | 100-250 | 3 × 1-206 |
| PN21639 | ORF020300-2233.2, Putative | | 3 × 1-190 |
| (SEQ ID NO: 178) | PP2A Regulatory Subunit, | | (output trait) |
| | Similar to OsCAA90866 | | |
| | (AAD39930; 5e⁻⁹²) | | |
| | (CAA90866, 5e⁻⁵³) | | |
| OsPN23045 | Novel Protein PN23045 | 100-250 | 2 × 240-287 |
| (SEQ ID NO: 188) | | | (input trait) |
| OsPN23225 | Novel Protein PN23225, | 100-250 | 639-792 |
| (SEQ ID NO: 190) | Similar to Tritticum aestivum | | (input trait) |
| | Initiation Factor (iso)4f p82 | | |
| | Subunit | | |
| | (AAA74724; e = 0) | | |
| OsPN29883 | Novel Protein PN29883, | 100-250 | 58-175 |
| (SEQ ID NO: 192) | Fragment | | (output trait) |

The names of the clones of the proteins used as baits and found as preys are given. Nucleotide/protein sequence accession numbers for the proteins of the Example (or related proteins) are shown in parentheses under the protein name. The bait and prey coordinates (Coord) are the amino acids encoded by the bait fragment(s) used in the search and by the interacting prey clone(s), respectively. The source is the library from which each prey clone was retrieved.

Two Hybrid Using OsPP2A as a Bait

[0929] The bait fragment encoding amino acids 1 to 308 of O. sativa Serine/Threonine Protein Phosphatase PP2A-2, Catalytic Subunit (OsPP2A-2) was found to interact with O. sativa (rice) putative proline-rich protein, which is possibly a transcriptional regulator. The bait fragment (i.e., aa 1-308 of OsPP2A-2) includes the serine/threonine protein phosphatase signature of OsPP2A-2. One prey clone encoding amino acids 122 to 224 of OsAAK63900 was retrieved from the input trait library. Somewhat surprisingly, this prey clone does not code for the HLH domain of OsAAK63900.

[0930] O. sativa Putative Proline-Rich Protein AAK63900 (OsAAK63900) (GENBANK® Accession No. AC084884) is a 224-amino acid protein that includes a putative transmembrane spanning region (amino acids 7 to 23). It also contains a gntR family signature (amino acids 10 to 34) common to a group of DNA-binding transcriptional regulation proteins in bacteria (see Buck & Guest, 1989; Haydon & Guest, 1991; Reizer et al., 1991). This signature includes a helix-loop-helix (HLH) protein dimerization domain (amino acids 5 to 20) that is often found in transcription factors (see Murre et al., 1989; Garrel & Campuzano, 1991, Kato & Dang, 1992; Krause et al., 1990; Riechmann et al., 1994). However, no DNA-binding motif is detectable.

[0931] Note that analysis of the amino acid sequence of OsAAK63900 also detected an Ole e I family signature (amino acids 30 to 162) including six conserved cysteines that are involved in disulfide bonds. This signature is a conserved region found in a group of plant pollen proteins of unknown function which tend to be secreted and consist of about 145 amino acids (and thus are shorter than OsAAK63900). The first of the Ole e I family of proteins to be discovered was Ole e I (IUIS nomenclature), a constitutive protein in the olive tree Olea europaea pollen and a major allergen (Villalba et al., 1993).

[0932] The bait fragment encoding amino acids 1 to 308 of OsPP2A-2 (which includes the serine/threonine protein phosphatase signature of OsPP2A-2) was also found to interact with O. sativa OsORF020300-223.2, a novel 418-amino acid protein which has a putative PP2A regulatory subunit, similar to OsCAA90866. Two prey clones encoding amino acids 93 to 387 and 118 to 388 of ORF020300-233 were retrieved from the input trait library, which indicates that OsORF020300-2233.2 interacts with OsPP2A-2 through a region within amino acids 118 to 387. OsORF020300-2233.2 includes a possible cleavage site between amino acids 50 and 51, although it appears to have no N-terminal signal peptide. OsORF020300-2233.2 is similar to A. thaliana PP2A regulatory subunit (GENBANK® Accession No. AAD39930.1; 44.5% amino acid sequence identity; 5e⁻⁹¹ expectation value). OsORF020300-2233.2 is also similar to rice chilling-inducible protein CAA90866 (GENBANK® Accession No. CAA90866, 68% sequence identity; 9e⁻⁴⁸ expectation value), a protein related to chilling tolerance in rice, with which OsORF020300-2233.2 also interacts. CAA90866 was also used as a bait protein, and the interactions identified for it are discussed later in this Example.

[0933] A BLAST analysis comparing the nucleotide sequence of OsORF020300-2233.2 against TMRI's GENECHIP® Rice Genome Array sequence database identified probeset OS015607_at (e⁻¹³⁵ expectation value) as the closest match. Gene expression experiments indicated that this gene is induced by the fungal pathogen M. grisea.

[0934] The bait fragment encoding amino acids 1 to 308 of OsPP2A-2 (which includes the serine/threonine protein phosphatase signature of OsPP2A-2) was also found to interact with a novel protein (PN23268), an enzyme similar to phosphoribosylanthranilate transferase that is likely involved in the plant response to pathogen infection. The novel protein, which was named OsPN23268, is similar to anthranilate phosphoribosyltransferase, a chloroplast precursor. Two prey clones encoding amino acids 12 to 200 of novel protein OsPN23268 were retrieved from the input trait library.

[0935] OsPN23268 is a novel 320-amino acid protein with a possible cleavage site between amino acids 43 and 44, although there does not appear to be an N-terminal peptide sequence. Analysis of the Os23268 protein sequence detected two domains originally defined in E. coli thymidine phosphorylase (Walter et al., 1990): the glycosyl transferase family, helical bundle domain (amino acids 1 to 61) and a glycosyl transferase family, a/b domain (amino acids 66 to 303). The latter contains a beta-sheet that is splayed open to accommodate a putative phosphate-binding site (Walter et al., 1990). Two prey clones of OsPN23268 retrieved from the input trait library and found to interact with OsPP2A-2 included sequence encoding amino acids 12 to 200 of novel protein OsPN23268. This sequence of OsPN23268 includes the glycosyl transferase family helical bundle domain and part of the a/b domain.

[0936] The glycosyl transferase family includes thymidine phosphorylase and anthranilate phosphoribosyltransferase enzymes. In mammalian cells, thymidine phosphorylase is identical to the angiogenic factor, platelet-derived endothelial cell growth factor (Morita-et al., 2001; Browns & Bicknell, 1998), and it also controls the effectiveness of the chemotherapeutic drug capecitabine by converting it to its active form (Ackland & Peters, 1999). As its name indicates, novel protein 23268 is similar to A. thaliana phosphoribosylanthranilate transferase (GENBANK® Accession No. AAB02913.1; 56.6% identity; 5e⁻⁹⁵), an enzyme with a role in the tryptophan biosynthetic pathway which is also found in bacteria (Edwards et al., 1988). In A. thaliana, this tryptophan biosynthetic enzyme is synthesized as a higher-molecular-weight precursor and then imported into chloroplasts to be processed into its mature form (Zhao & Last, 1995). The A. thaliana anthranilate phosphoribosyltransferase is also similar to DESCA11 (GENBANK® Accession No. B1534445; e⁻¹⁷), one of the genes identified in Chenopodium amaranticolor (a plant with broad-spectrum virus resistance) which are induced during the hypersensitive response (HR) response of the plant subsequent to infection with tobacco mosaic virus and tobacco rattle tobravirus (Goff, 2001).

[0937] A BLAST analysis comparing the nucleotide sequence of OsPN23268 against TMRI's GENECHIP® Rice Genome Array sequence database identified probeset OS015603_s_at (3e⁻⁴¹ expectation value) as the closest match. The gene expression experiments disclosed herein indicate that this gene is induced by the fungal pathogen M. grisea.

[0938] The bait fragment of OsPP2A-2 containing amino acids 150 to 308 was also found to interact with the seed storage protein glutelin CAA33838 (OsCM33838). Glutelin CAA33838 is the major seed storage protein in rice. Its cDNA sequence was identified by Wen et al., 1989, and the accumulation of the protein in rice endosperm occurs between five and seven days after flowering (Udaka et al., 2000). One prey clone encoding amino acids 5 to 155 of OsCM33838 was retrieved from the output trait library.

[0939] OsCM33838 (GENBANK® Accession No. X15833) is a 499-amino acid protein that includes a cleavable signal peptide (amino acids 1 to 24), as determined by analysis of the amino acid sequence. The analysis identified an 11S plant seed storage protein domain (amino acids 1 to 469; 1e⁻²⁴³). The 11S plant seed storage proteins tend to be glycosylated proteins that form hexameric structures. They are composed of two peptides linked by disulfide bonds and are also members of the cupin superfamily of proteins by virtue of their two beta-barrel domains. The analysis also detected this domain but localized it to a narrower region (amino acids 302 to 324). In addition, a 7S seed storage protein, C-terminal domain (amino acids 319 to 478; 602e⁻⁰⁴), was identified which is also found in members of the cumin superfamily. In agreement with the evidence that OsCM33838 is a glycosylated protein, an N-glycosylation site (amino acids 491 to 494) was identified.

[0940] A BLAST analysis comparing the nucleotide sequence of OsCM33838 against TMRI's GENECHIP® Rice Genome Array sequence database identified probeset OS000688.1_at (e=0 expectation value) as the closest match. Our gene expression experiments indicate that this gene is not specifically expressed in several different tissue types and is not specifically induced by a broad range of plant stresses, herbicides, or applied hormones.

[0941] The bait fragment of OsPP2A-2 was also found to interact with novel protein PN26645, a putative protein disulfide isomerase-related protein precursor (also called OsPN26645). The bait fragment used in this search encodes amino acids 1 to 308 of OsPP2A-2, which includes the serine/threonine protein phosphatase signature of OsPP2A-2. One prey clone encoding amino acids 24 to 164 of OsPN26645 was retrieved from the input trait library. OsPN26645 is a 311-amino acid protein that includes a cleavable signal peptide (amino acids 1 to 17) and a predicted transmembrane domain (amino acids 210 to 226), as determined by analysis of the amino acid sequence. A BLAST analysis against the Genpept database revealed that OsPN26645 is similar to an A. thaliana protein (GENBANK® Accession No. BAB09470.1; 32.8% identity; e⁻²⁸) that is similar to the rat protein disulfide isomerase-related protein precursor (GENBANK® Accession No. AAD46003, 46% identity, 1e⁻⁶³). As its name indicates, disulfide isomerase catalyzes the formation of disulfide bonds. This enzyme can therefore be important for proper protein folding. In mammals, disulfide isomerase in the lumen of the endoplasmic reticulum creates disulfide bonds in secretory and cell-surface proteins, and microsomes deficient in this enzyme are unable to conduct cotranslational formation of disulphide bonds (Bulledi & Freedman, 1988). Although the activity of this enzyme is not as well characterized in plants, it is likely that it serves in a similar capacity.

[0942] A BLAST analysis comparing the nucleotide sequence of OsPN26645 against TMRI's GENECHIP® Rice Genome Array sequence database identified probeset OS002485.1_at (e⁻¹⁰⁵ expectation value) as the closest match. Gene expression experiments indicated that this gene is not specifically expressed in several different tissue types and is not specifically induced by a broad range of plant stresses, herbicides, or applied hormones.

[0943] The bait fragment of OsPP2A-2 was also found to interact with novel protein PN24162 (OsPN24162), a porin-like, voltage-dependent anion channel protein. The bait fragment used in this search encodes amino acids 150 to 308 of OsPP2A-2. One prey clone encoding amino acids 28 to 164 of OsPN24162 was retrieved from the output trait library. BLAST analysis of the OsPN24162 amino acid sequence indicated that this protein is most similar to a porin-like protein from A. thaliana (GENBANK® Accession No. NP_{—}201551; 53% amino acid sequence identity; 3e⁻⁸⁶). OsPN24162 is also similar to a rice mitochondrial voltage-dependent anion channel (GENBANK® Accession #Y18104; 44% identity; 2e⁻⁶¹), a 274-amino acid protein encoded by a cDNA found to belong to a small multigene family in the rice genome (Roosens et al., 2000). Expression of this gene was found to be regulated in function of the plantlets maturation and organs, and not responsive to osmotic stress (Roosens et al., 2000). Mitochondrial voltage-dependent ion channels are also called mitochondrial porins by analogy with the proteins forming pores in the outer membrane of Gram-negative bacteria.

[0944] A BLAST analysis comparing the nucleotide sequence of OsPN24162 against TMRI's GENECHIP® Rice Genome Array sequence database identified probeset OS007036.1_at (e⁻⁶⁵ expectation value) as the closest match. Our gene expression experiments indicate that this gene is not specifically expressed in several different tissue types and is not specifically induced by a broad range of plant stresses, herbicides, or applied hormones.

[0945] The bait fragment of OsPP2A-2 was also found to interact with search a DnaJ-like protein with a putative role in the pathogen-induced defense response. The bait fragment used in this search encodes amino acids 150 to 308 of OsPP2A-2. One prey clone encoding amino acids 99 to 368 of Os011994-D16 was retrieved from the output trait library. This new protein was named 011994-D16 or, because it was identified from O. sativa, Os011994-D16.

[0946] BLAST analysis of the Os011994-D16 amino acid sequence indicated that this protein is similar to maize (Zea mays) DnaJ protein homolog ZMDJ1 (GENBANK® Accession No. T01643; 84% identity; e=0). In eukaryotic cells, DnaJ-like proteins regulate the chaperone (protein folding) function of Hsp70 heat-shock proteins through direct interaction of different Hsp70 and DnaJ-like protein pairs (Cyr et al., 1994). Heat shock proteins (reviewed in Bierkens et al., 2000) are stress proteins which function as intracellular chaperones to facilitate protein folding and assembly and which are selectively expressed in plant cells in response to a range of stimuli, including heat and a variety of chemicals. As regulators of heat shock proteins, DnaJ-like proteins are thus part of the plant protective stress response.

[0947] A BLAST analysis comparing the nucleotide sequence of Os011994-D16 against TMRI's GENECHIP® Rice Genome Array sequence database identified probeset OS009139.1_at (e=0 expectation value) as the closest match. Gene expression experiments indicated that expression of this gene is repressed by the plant hormone jasmonic acid.

Yeast Two-Hybrid Using O. sativa Chilling-Inducible Protein CAA90866 (OsCAA90866) as Bait

[0948] The bait protein, namely O. sativa chilling-inducible protein CAA90866 (OsCAA90866), is a 379-amino acid protein encoded by a complete cDNA sequence related to chilling tolerance in rice. BLAST analysis indicated that OsCAA90866 is similar to the same PP2A regulatory subunit from A. thaliana (GENBANK® Accession No. AAD39930; 35% amino acid sequence identity; e⁻⁵⁷ expectation value) that was found similar to OsORF020300-223, interactor for the bait protein PP2A-2 (see Example III). A BLAST analysis comparing the nucleotide sequence of the chilling-inducible protein against TMRI's GENECHIP® Rice Genome Array sequence database identified probeset OS015052_at (4e⁻⁷⁸ expectation value) as the closest match. Gene expression experiments indicated that this gene is induced by cold stress.

[0949] As described in Table 32, a bait clone encoding amino acids 100 to 250 of O. sativa Chilling-inducible Protein CAA90866 (OsCAA90866) was found to interact with a prey clone encoding amino acids 1 to 126 of the same protein retrieved from the output trait library.

[0950] In addition, the bait clone encoding amino acids 100 to 250 of O. sativa Chilling-inducible Protein CAA90866 (OsCAA90866) was found to interact with Os008938-3209. Four prey clones encoding amino acids 53-259 of Os008938-3209 were retrieved from the input trait library. Os008938-3209 is a 260-amino acid protein that includes a 14-3-3 protein signature 1 (amino acids 48-60) and a 14-3-3 protein signature 2 (amino acids 220 to 260), which suggests that Os008938-3209 is a member of the 14-3-3 family. BLAST analysis indicated that the amino acid sequence of Os008938-3209 shares 100% identity with that of rice putative 14-3-3 protein (GENBANK® Accession No. AAK38492, 8e⁻¹⁴⁵). The 14-3-3 proteins interact with regulators of cellular signaling, cell cycle regulation, and apoptosis. They are thought to act as molecular scaffolds or chaperones and to regulate the cytoplasmic and nuclear localization of proteins with which they interact by regulating their nuclear import/export (Zilliacus et al., 2001; reviewed by Muslin & Xing, 2000). Since 14-3-3 proteins participate in protein complexes within the nucleus (Imhof & Wolffe, 1999; Zilliacus et al., 2001), cytoplasm (De Lille et al., 2001), mitochondria (De Lille et al., 2001) and chloroplast (Sehnke et al., 2000), additional information would be necessary to determine where Os008938-3209 resides within the cell. Cellular localization of this prey protein could lead to a better interpretation of the significance of its interaction with chilling-inducible protein CAA90866.

[0951] A BLAST analysis comparing the nucleotide sequence of the Os008938-3209 protein against TMRI's GENECHIP® Rice Genome Array sequence database identified probeset OS008938_s_at (e⁻⁶¹ expectation value) as the closest match. Gene expression experiments indicated that this gene is induced by salicylic acid, ABA, BAP, BL2, and 2,4-D, during cold stress, and under drought conditions.

[0952] In addition, the bait clone encoding amino acids 100 to 250 of O. sativa Chilling-inducible Protein CAA90866 (OsCAA90866) was found to interact with OsAAG46136, a pyrrolidone carboxyl peptidase from O. sativa. Two prey clones encoding amino acids 92-222 of OsAAG46136 were retrieved from the input trait library. These clones include the pyroglutamyl peptidase I motif of OsAAG46136.

[0953] OsAAG46136 is a 222-amino acid protein that contains a pyroglutamyl peptidase I motif (amino acids 11 to 221). This motif is found in the N-terminal regions of peptide hormones (including thyrotropin-releasing hormone and luteinizing hormone releasing hormone), and it confers protease resistance to the protein (Odagaki et al., 1999). BLAST analysis indicated that the amino acid sequence of OsAAG46136 shares 100% identity with that of rice putative pyrrolidone carboxyl peptidase (GENBANK® Accession No. AAG46136; 4e⁻¹²⁶). OsAAG46136 is also similar to two unknown proteins from A. thaliana (GENBANK® Accession Nos. NP_{—}176063, 8e⁻⁰⁸⁰ and AAK25976.1, e⁻⁰⁷⁶, both not described in the literature. The similarity of OsAAG46136 to pyrrolidone carboxyl peptidase gives some suggestion as to the function of this poorly defined rice protein. Pyrrolidone carboxyl peptidase (Pcps) is an enzyme that removes an N-terminal pyroglutamyl group from some proteins. It is present in many species (reviewed by Awade et al., 1994) and is a valuable tool for bacterial diagnosis (most of the literature describing this protein addresses bacterial homologs). The active site of the Pseudomonas fluorescens Pcps has been characterized and the nature of this site (Cys-144 and His-166 are necessary for activity) suggests that it can represent a new class of thiol aminopeptidases (Le Saux et al., 1996). Peptidases in this protein family are necessary for processing and activation of important bioactive peptides including amyloid precursor protein (APP), strongly implicated in Alzheimer's disease (Lefterov et al., 2000). Furthermore, this enzyme deaminates and thus inactivates the glycopeptide anticancer agent bleomycin (Schwartz et al., 1999).

[0954] A BLAST analysis comparing the nucleotide sequence of OsAAG46136 against TMRI's GENECHIP® Rice Genome Array sequence database identified probeset OS013894_s_at (e⁻⁸ expectation value) as the closest match. The expectation value is too low for this probeset to be a reliable indicator of the gene expression of OsAAG46136.

[0955] The bait clone encoding amino acids 100 to 250 of O. sativa Chilling-Inducible Protein CAA90866 (OsCAA90866) was also found to interact with protein ORF020300-2233.2 (OsORF020300-223), having a putative PP2A regulatory subunit and being similar to OsCAA90866 (see description in Example III). Three prey clones encoding-amino acids 1 to 206 and three prey clones encoding amino acids 1-190 of OsORF020300-2233.2 were retrieved from the output trait library.

[0956] Additionally, the bait clone encoding amino acids 100 to 250 of O. sativa Chilling-Inducible Protein CAA90866 (OsCAA90866) was found to interact with protein PN23045 (OsPN23045). Two prey clones encoding amino acids 240 to 287 of OsPN23045 were retrieved from the input trait library.

[0957] OsPN23045 is a 287-amino acid protein that includes an inositol P domain (amino acids 233 to 272). This domain was identified in bovine inositol polyphosphate 1-phosphatase protein, which is involved in signal transduction (see York et al., 1994). Mikami et al. showed that phosphatidylinositol-4-phosphate 5-kinase (AtPIP5K11) is induced by water stress and abscisic acid (ABA) in A. thaliana, suggesting a link between phosphoinositide signaling cascades with water-stress responses in plants (Mikami et al., 1998). Xiong et al. reported that FRY1, a mutant gene in A. thaliana encoding an inositol polyphosphate 1-phosphatase, is a negative regulator of ABA and stress signaling in this plant (Xiong et al., 2001a), providing evidence that phosphoinositols mediate ABA and stress signal transduction in plants.

[0958] A BLAST analysis comparing the nucleotide sequence of OsPN23045 against TMRI's GENECHIP® Rice Genome Array sequence database identified probeset OS006742.1_at (e=0 expectation value) as the closest match. Gene expression experiments indicated that this gene is specifically expressed in leaf and stem.

[0959] The bait clone encoding amino acids 100 to 250 of O. sativa Chilling-Inducible Protein CAA90866 (OsCAA90866) was also found to interact with protein PN23225, which is a novel 792-amino acid protein similar to T. aestivum initiation factor (iso)4f p82 subunit (p82) (GENBANK® Accession No. AAA74724; 69.6% amino acid sequence identity; e=0). One prey clone encoding amino acids 639 to 792 of OsPN23225 was retrieved from the input trait library. The wheat protein contains possible motifs for ATP binding, metal binding, and phosphorylation (Allen et al., 1992). OsPN23225 contains an MIF4G domain (amino acids 207 to 434) named after Middle domain of eukaryotic initiation factor 4G (eIF4G), and an MA3 domain (amino acids 627 to 739) also found in eIF proteins (Ponting, 2000). These domains are found in molecules that participate in mRNA decay pathways. Although the function of the bait chilling-inducible protein CAA90866 is not well defined, it appears to be a nuclear protein and its interaction with the eIF-like protein OsPN23225 supports the notion that CAA90866 participates in the rice transcriptional machinery. The identification of the OsPN23225 prey protein likely represents the discovery of a novel rice eIF.

[0960] A BLAST analysis comparing the nucleotide sequence of OsPN23225 against TMRI's GENECHIP® Rice Genome Array sequence database identified probeset OS003249_at (e⁻¹⁷ expectation value) as the closest match. The expectation value is too low for this probeset to be a reliable indicator of the gene expression of OsPN23225.

[0961] The bait clone encoding amino acids 100 to 250 of O. sativa Chilling-Inducible Protein CAA90866 (OsCAA90866) was also found to interact with OsPN29883, a 340-amino acid fragment that is similar to A. thaliana putative 2-dehydro-3-deoxyphosphooctonate aldolase (GENBANK® Accession No. NP_{—}178068; 3e⁻¹⁴² expectation value) and pea (Pisum sativum) 2-dehydro-3-deoxyphosphooctonate aldolase (Kdo8P synthase; GENBANK® Accession No. O50044; 3e⁻¹⁴² expectation value). One prey clone encoding amino acids 58 to 175 of OsPN29883 was retrieved from the output trait library. Kdo8P synthase in pea catalyzes the biosynthesis of Kdo-8-P, a component of lipopolysaccharide of plant cell walls, with high structural and functional similarities to enterobacterial Kdo8P synthase (Brabetz et al., 2000).

Summary

[0962] The interactors identified for the OsPP2A-2 bait protein (i.e., proteins that bind to OsPP2A-2) comprise a network that is speculated to be associated with the plant defense response to pathogens. Among the five novel rice proteins identified as interactors for OsPP2A-2, Os23268 is similar to the A. thaliana tryptophan biosynthetic enzyme anthranilate phosphoribosyltransferase. This enzyme is encoded by a gene that is similar to the DESCA11 gene involved in resistance to virus infection (Goff, 2001). While the role of tryptophan in disease resistance is unknown, tryptophan is used in the biosynthesis of indol-3-acetic acid, a plant hormone and signaling molecule. Tryptophan can thus have a role in modulation of gene expression in plants. Moreover, the glycosyl transferase function in Os23268 can be associated with disease resistance signaling pathways or with phytoalexin cellular distribution. Phytoalexins are low-molecular-weight antimicrobial compounds that accumulate in plants as a result of infection or stress, and the rapidity of their accumulation is associated with resistance in plants to diseases caused by fungi and bacteria. Taken altogether, these data suggest that anthranilate phosphoribosyltransferases plays a role in the plant response to pathogen infection. Moreover, gene expression experiments confirmed that this gene is induced by the fungal pathogen M. grisea. Thus, the anthranilate phosphoribosyltransferase-like novel protein Os23268 is believed to be involved in the signaling and regulation pathways that mediate the response of rice to biotic stress.

[0963] Novel protein Os011994-D16, similar to DnaJ protein, is another interactor for OsPP2A-2 with a likely role in the pathogen-induced defense response. DnaJ-like proteins are known to be regulators of heat shock proteins and are thus part of the plant protective stress response. Gene expression experiments support this notion, indicating that the gene encoding the DnaJ-like protein of this Example is repressed by jasmonic acid, a component of signaling networks that provide the specificity of plant pathogen-induced defense responses (reviewed in Nurnberger & Scheel, 2001);

[0964] OsPP2A-2 was also found to interact with the novel protein OsORF020300-223, which is similar to A. thaliana PP2A regulatory subunit and to rice chilling inducible protein CAA90866 (OsCAA90866; the second bait protein of this Example). The similarity of OsORF020300-2233.2 to PP2A regulatory subunit validates its interaction with the PP2A-2 catalytic subunit, this interaction being consistent with the subunit composition of PP2A enzymes (Awotunde et al., 2000). The OsORF020300-223-OsPP2A-2 interaction suggests that OsORF020300-2233.2 participates in signaling events that involve OsPP2A-2 enzymatic activity, and the similarity of OsORF020300-2233.2 to rice chilling-inducible protein OsCAA90866 suggests that cold tolerance can involve one of these signaling events.

[0965] OsPP2A-2 was also found to interact with rice putative proline-rich protein OsAAK63900. Though it has no known DNA-binding motif, there are indications that OsAAK63900 can play a role as a transcriptional regulator. It has an HLH domain common to transcription factors, although this domain mediates protein dimerization only. It also has a gntR family signature common to bacterial DNA-binding transcriptional regulators, although the function of this domain is not known. The existence of the Ole e I suggests that OsPP2-2 can dephosphorylate OsAAK69300, thus regulating its function as a pollen protein, although the lack of data on the Ole e I signature function makes this possibility more difficult to argue. Evidence also exists that PP2A proteins regulate the DNA-binding activity of transcription factors in plants (Vazquez-Tello et al., 1998) and mammalian cells (Wadzinski et al., 1993). Therefore, it is most likely that the OsPP2A-2-OsAAK63900 interaction occurs in the nucleus and that it plays a role in regulating transcriptional events in rice.

[0966] Other proteins found to interact with OsPP2A-2 include a disulfide isomerase with a putative role in protein folding (novel protein OsPN26645), a voltage-dependent ion channel protein (novel protein OsPN24162) and the seed storage protein glutelin (OsCM33838). The biological significance of these interactions is unclear. Analysis of the amino acid sequence of glutelin identified several protein kinase C and casein kinase II phosphorylation sites. It is possible that the phosphorylation state of glutelin determines its function or stability, and its interaction with OsPP2A-2 can occur during dephosphorylation of glutelin. Alternatively, this interaction can result in localization of OsPP2A-2 and thereby affect events downstream of OsPP2A-2-dependent dephosphorylation. Given the presence of a disulfide bond between the two peptide chains of typical plant seed storage proteins, it is interesting that OsPP2A-2 also interacts with a putative protein disulfide isomerase (OsPN26645). Perhaps OsPP2A-2 interacts with other enzymes to create a co-translational modification complex. Additional yeast-two-hybrid data can clarify the purpose of these interactions. However, given the association of PP2A with other proteins involved in biotic stress responses, the aforementioned associations could also be involved in biotic stress responses.

[0967] The chilling-inducible protein CAA90866 was found to interact with itself and with six proteins. These proteins are speculated to interact as components of a network of proteins relevant to the rice response to cold stress. This hypothesis finds support in gene expression experiments, which confirmed that the gene encoding the chilling-inducible protein is induced by cold. One of the interactors is the putative 14-3-3 protein Os008938-3209. The relationship to chilling tolerance of the bait protein OsCAA90866 suggests that its interaction with Os008938-3209 can be associated with cold tolerance. Gene expression experiments showed that this protein is induced under a broad range of stress conditions. Its activation probably allows its interaction with a number of stress proteins. Given the function of 14-3-3 proteins as molecular chaperones, Os008938-3209 can act as a molecular glue for these interactions to preserve protein complex stability in membranes, or it can coordinate interactions involving transcription factors associated with stress genes; Subcellular localization of Os008938-3209 can further clarify the significance of its interaction with OsCAA90866.

[0968] Another interactor for OsCAA90866 is a pyrrolidone carboxyl peptidase-like protein (OsAAG46136). The putative pyrrolidone carboxyl peptidase function of OsAAG46136 suggests that it participates in processing and/or activation of substrate proteins, and these proteins can be important to the plant response to chilling. Peptidase activity has been associated with regulation of signaling. Carboxypeptidases, for instance, hydrolytically remove the pyroglutamyl group from peptide hormones, thereby activating these signaling molecules. A carboxypeptidase regulates Brassinosteroid-insensitive 1 (BRI1) signaling in A. thaliana by proteolytic processing of a protein (Li et al., 2001). Based on its ability to interact with chilling-inducible protein and on the role of the latter in chilling tolerance, it is speculated that the carboxypeptidase-like protein OsAAG46136 can have a role in activating signaling molecules/hormonal peptides that are involved in the plant response to cold stress.

[0969] The interactions of OsCAA90866 with OsPN23045, a protein with a putative inositol phosphate function, and with OsPN23225, a rice homolog of wheat initiation factor (iso)4f p82 subunit, provide further insight into the function of the bait protein. Phosphoinositols are known to mediate ABA and stress signal transduction in plants (Mikami et al., 1998; Xiong et al., 2001 a). The putative inositol phosphatase protein OsPN23045 can function in a similar way and its interaction with the chilling-inducible protein can be associated with regulation of cell signaling events that relate to cold tolerance. The prey protein OsPN23225 likely represents a novel rice eIF. The eIF proteins have a role in RNA processing pathways (Ponting, 2000) and stress is typically associated with an abundance of RNA transcripts. Based on this information and on the relationship that CAA90866 has to chilling tolerance, the OsCA90866-PN23225 interaction is speculated to control translational events related to cold stress.

[0970] Finally, OsCAA90866 interacts with and is similar to the same putative PP2A regulatory subunit protein OsORF020300-2233.2 found to interact with the bait protein OsPP2A-2. This interaction provides a link between the two networks of this Example and suggests the involvement of OsPP2A-2 in both biotic and abiotic stress response pathways. Based on the observed interactions and on sequence similarities among the proteins involved in these interactions, OsPP2A-2 appears to regulate both biotic and abiotic stress response pathways. Thus, the two pathways, though independent, are speculated to be linked through protein phosphatases, and that these enzymes likely mediate the plant's stress response by dephosphorylation of the proteins participating in these pathways. In this scenario, it is possible that the self-interaction observed for OsCAA90866 participates in the creation of multicomponent phosphatase complexes. Furthermore, the interaction of OsCA90866 with the aldolase-like protein OsPN29883 suggests that the aldolase needs to be dephosphorylated for activation/inactivation, and that this novel protein can have roles during stress responses based upon the other interactions and the gene expression patterns of the chilling-inducible protein.

[0971] Moreover, OsORF020300-2233.2 the A. thaliana regulatory A subunit of protein phosphatase 2A (PP2A-A) has been implicated in the regulation of auxin transport in A. thaliana (Garbers et al., 1996). The phytohormone auxin controls processes such as cell elongation, root hair development and root branching. Since OsORF020300-2233.2 is also similar to and interacts with chilling-inducible protein CAA90866, it is possible that the latter can be involved in auxin transport.

### REFERENCES

[0972] The references listed below as well as all references cited in the specification are incorporated herein by reference to the extent that they supplement, explain, provide a background for or teach methodology, techniques and/or compositions employed herein.
[0973] Aasland et-al. (1995) Trends Biochem. Sci. 20: 56-59.
[0974] Abdel-Ghany et al. (2000) DNA Cell Biol. 19: 567-578.
[0975] Abler et al. (1993) Plant Mol. Biol. 22: 1031-1038.
[0976] Ach & Gruissem (1997) Proc. Natl. Acad. Sci. USA 91: 5863-5867.
[0977] Ackland & Peters, (1999) Drug Resist. Update 2: 205-214.
[0978] Agrawal S (ed.) (1993) Methods in Molecular Biology, volume 20, Humana Press, Totowa, N.J., United States of America.
[0979] Agueli et al. (2001) Biochem. J. 360: 413-419.
[0980] Aihara et al. (2000) J. Neurochem. 74: 2622-2625.
[0981] Ajuh et al. (2001) J. Biol. Chem. 276: 42370-42381.
[0982] Allen et al. (1992) J. Biol. Chem. 267: 23232-23236.
[0983] Allison et al. (1986) Virology 154:9-20.
[0984] Altschul et al. (1990) J. Mol. Biol. 215:403.
[0985] Altschul et al. (1997) Nucl. Acids Res. 25: 3389.
[0986] An et al. (1985) EMBO J. 4: 277.
[0987] Antoku et al. (2001) Biochem. Biophys. Res. Commun. 286: 1003-1010.
[0988] Aoyama & Chua (1997) Plant J 11:605-612.
[0989] Apte et al. (1995) FEBS Left. 363: 304-306.
[0990] Arino et al. (1993) Plant Mol. Biol. 21: 475-485.
[0991] Arioli et al. (1998) Science 279: 717-720.
[0992] Auch & Reth (1990) Nucl. Acids Res. 18: 6743.
[0993] Austin et al. (2002) Science 295: 2077-2080.
[0994] Ausubel et al. (1988) Current Protocols in Molecular Biology, John Wiley & Sons, New York, N.Y., United States of America.
[0995] Awade et al. (1994) Proteins 20: 34-51.
[0996] Awotunde et al. (2000) Biochim Biophys Acta 1480: 65-76.
[0997] Azevedo et al. (2002) Science 295: 2073-2076.
[0998] Aznar & Lacal (2001) Prog. Nucleic Acid Res. Mol. Biol. 67: 193-234.
[0999] Baluska et al. (2001) Plant Physiol. 126: 39-46.
[1000] Bartel & Fields (eds.), (1997) The Yeast Two-Hybrid System, Oxford Press.
[1001] Bartlett et al. (1982) in Methods in Chloroplast Molecular Biology, (Edelman et al., eds.) Elsevier Biomedical Press, New York, N.Y., United States of America, pp. 1081-1091.
[1002] Baskin et al. (1992) Aust. J. Plant Physiol. 19: 427-437.
[1003] Batzer et al. (1991) Nucleic Acid Res. 19:5081.
[1004] Baunsgaard et al. (1998) Plant J. 13: 661.
[1005] Beerli et al. (1998) Proc Nat Acad Sci USA 95:14628-14633.
[1006] Bergeron et al. (1994) Trends Biochem. Sci. 19: 124-128.
[1007] Bertolaet et al. (2001) Nat. Struct. Biol. 8: 417-422.
[1008] Bevan (1984) Nucl. Acids Res. 12:8711.
[1009] Bevan et al. (1983) Nature 304:184-187.
[1010] Bezzi et al. (2001) Nat. Neurosci. 4: 702-710.
[1011] Biedenkapp et al. (1988) Nature 335: 835-837.
[1012] Bierkens et al. (2000) Toxicology 153: 61-72.
[1013] Bihn et al. (1997) Plant J. 12: 1439-1445.
[1014] Binet et al. (1991) Plant Mol Biol 17:395-407.
[1015] Bischoff et al. (1994) Proc. Natl. Acad. Sci. USA 91: 2587-2591.
[1016] Bisikirska et al. (1997) Z. Naturforsch 52: 180-186.
[1017] Blochinger & Diggelmann (1984) Mol Cell Biol 4:2929-2931.
[1018] Bolhuis et al. (1998) J. Biol. Chem. 273: 21217-21224.
[1019] Borisjuk et al. (1998) Planta 206: 504-14.
[1020] Bornemann et al. (1996) Biochemistry 35: 9907-9916.
[1021] Bourouis & Jarry (1983) EMBO J 2:1099-1104.
[1022] Brabetz et al. (2000) Planta 212: 136-143.
[1023] Bradwell et al. (1994) Genes Dev. 8: 1664-1677.
[1024] Braun (2001) Plant Physiol. 125:1611-1619.
[1025] Briknarova et al. (2001) Nat. Struct. Biol. 8: 349-352.
[1026] Browns & Bicknell (1998) Biochem. J. 334: 1-8.
[1027] Bruggemann et al. (1996) Plant J 10:755-760.
[1028] Brummelkamp et al. (2002) Science 296: 550-3.
[1029] Brunner et al. (1998) Plant J. 14:225-34.
[1030] Buchanan et al. (eds.), (2002) Biochemistry and Molecular Biology of Plants, John Wiley & Sons, New York, N.Y., United States of America.
[1031] Buck & Guest (1989) Biochem. J. 260: 737-747.
[1032] Bulledi & Freedman (1988) Nature 335: 649-651.
[1033] Burglin et al. (1997) Nucl. Acids Res. 25: 4173-4180.
[1034] Bursch (2001) Cell Death Differ. 8: 569-81.
[1035] Busch et al. (1990) Trends Genet. 6; 36-40.
[1036] Byrne et al. (1987) Plant Cell Tissue Org Culture 8: 3.
[1037] Caddick et al., (1998) Nat Biotechnol 16:177-180.
[1038] Callebaut & Mornon (1997) FEBS Lett. 400: 25-30.
[1039] Callis et al. (1987) Genes Dev. 1: 1183.
[1040] Callis et al., (1990) J Biol Chem 265:12486-12493.
[1041] Cao et al. (2000) Arch Biochem Biophys. 373: 135-46.
[1042] Casas et al., (1993) Proc Natl Acad Sci USA 90:11212-6.
[1043] Cash (1996) Med Hypotheses 47: 455-459.
[1044] Chan et al. (1998) Biochim. Biophys. Acta 1442: 1-19.
[1045] Chee et al. (1989) Plant Physiol. 91:1212.
[1046] Chen et al. (1993) Science 262: 1883-1886.
[1047] Chen et al. (2002) Plant Cell 14: 559-574.
[1048] Chibbar et al., (1993) Plant Cell Rep 12:506-509.
[1049] Choi et al. (1995) Mol Gen, Genet. 246:266.
[1050] Christensen et al., (1989) Plant Mol Biol 12:619-632.
[1051] Christou et al. (1988) Plant Physiol. 87:671.
[1052] Christou et al. (1989) Proc. Natl. Acad. Sci. USA 86:7500.
[1053] Christou et al., (1991) Bio/Technology 9: 957-962.
[1054] Chuang & Meyerowitz, (2000) Proc Natl. Acad Sci USA 97:4985-90.
[1055] Chung et al. (1994) Plant Mol. Biol. 26: 657-665.
[1056] Claes et al. (1990) Plant Cell 2: 19-27.
[1057] Close et al. (1989) Plant Mol. Biol. 13: 95-108.
[1058] Comai et al., (1988) J Biol Chem 263:15104-15109.
[1059] Conceicao et al. (1994) Plant 5:493.
[1060] Corpet et al. (1988) Nucl. Acids Res. 16:10881.
[1061] Creighton, (1984) Proteins, WH Freeman & Co., New York, N.Y., United States of America.
[1062] Crossway et al. (1986) Bio/Techniques 4:320.
[1063] Cruz et al. (1998) P. R. Health Sci. J. 17: 323-326.
[1064] Cyr et al. (1994) Trends Biochem. Sci. 19: 176-181.
[1065] Dasgupta et al. (1993) Gene 133: 301.
[1066] Dasso (2000) Cell 104: 321-324.
[1067] Dat et al. (2001) Redox Rep. 6: 37-42.
[1068] Datta et al. (1990) Bio/Technology 8: 736.
[1069] Davies et al. (1996) EMBO J. 15:4330-4343.
[1070] De Block et al. (1989) Plant Physiol. 91:694.
[1071] de Framond, (1991) FEBS Lett 290:103-6.
[1072] Della-Cioppa et al. (1987) Plant Physiol. 84:965.
[1073] De Lille et al. (2001) Plant Physiol. 126: 35-38.
[1074] Denecke et al. (1995) Plant Cell 7: 391-406.
[1075] Doelling et al. (2001) Plant J. 27: 393-405.
[1076] Dong et al., (1996) Mol Breeding 2:267-276.
[1077] Doonan et al. (1997) Curr. Opin. Cell. Biol. 9: 824-830.
[1078] Dunigan & Madlener (1995) Virology 207: 460-466.
[1079] Dure et al. (1989) Plant Mol. Biol. 12: 475-486.
[1080] Dwyer et al. (1996) Biochim Biophys Acta 1289: 231-237.
[1081] Ecker (1995) Science 268: 667-675.
[1082] Ecker & Davis, (1986) Proc Natl Acad Sci USA 83:5372-5376.
[1083] Edwards et al. (1988) J. Mol. Biol. 203: 523-524.
[1084] Elbashir et al., (2001) EMBO J 20:6877-88.
[1085] Elge et al. (2001) Plant J. 26: 561-571.
[1086] Ellenberger (1994) Cuff. Opin. Struct. Biol. 4:12-21.
[1087] Ellis et al. (1987) EMBO J., 6:3203.
[1088] Elroy-Stein et al. (1989) Proc. Natl. Acad. Sci. USA. 86:6126.
[1089] EP0 120 516
[1090] EP 0 138 341
[1091] EP 0 292 435
[1092] EP 0 295 959
[1093] EP 0 301 749
[1094] EP 0 332 104
[1095] EP 0 332 581
[1096] EP 0 342 926
[1097] EP 0 392 225
[1098] EP 1 116 793
[1099] Everett et al. (1987) Bio/Technology 5:1201.
[1100] Fardel et al. (2001) Toxicology 167: 37-46.
[1101] Feys et al. (2001) EMBO J. 20: 5400-5411.
[1102] Fire et al. (1998) Nature 391: 806-811.
[1103] Firek et al., (1993) Plant Mol Biol 22:129-142.
[1104] Frary et al. (2000) Science 289: 85-88.
[1105] Freier et al., (1986) Proc Natl Acad Sci USA 83:9373-9377.
[1106] Fromental-Ramain et al. (1996) Development 122: 461-472.
[1107] Fromm et al. (1986) Nature 319: 791.
[1108] Fromm et al. (1990) Bio/Technology 8: 833.
[1109] Fromme et al. (2001) Biochim. Biophys Acta 1507: 5-31.
[1110] Fujiyama et al. (2001) J. Comp. Neurol. 435: 379-387.
[1111] Gaedeke et al. (2001) EMBO J. 20:1875-1887.
[1112] Gallie et al. (1987) Nucl. Acids Res. 15:3257.
[1113] Gallie et al. (1989) Plant Cell 1:301.
[1114] Gallois et al. (1997) Plant J. 11: 1325-1331.
[1115] Garbers et al. (1996) EMBO J. 15: 2115-2124.
[1116] Garcia et al. (1998) Planta 207: 172-80.
[1117] Garcia et al. (2000) Microbes Infect. 2: 401-407.
[1118] Garrel & Campuzano (1991) BioEssays 13: 493-498.
[1119] Gehring (1992) Trends Biochem. Sci. 17: 277-280.
[1120] Gehring & Hiromi (1986) Ann. Rev. Genet. 20: 147-173.
[1121] Gillet et al. (1998) Plant J. 16: 257-262.
[1122] Glazebrook et al. (1996) Genetics 143: 973-982.
[1123] Godwin et al. (1998) Proc. Natl. Acad. Sci. USA 95: 13042-13047.
[1124] Goeddel, (1990) Methods in Enzymology, Volume 185, Academic Press, San Diego, Calif., United States of America.
[1125] Goff (2001) Plant J. 26: 339-349.
[1126] Goff et al. (2002) Science 296: 92-100.
[1127] Gocal et al. (2001) Plant Physiol. 125: 1788-1801.
[1128] Gordon Kamm et al. (1990) Plant Cell 2:603.
[1129] Greco et al. (1997) Mol. Gen. Genet. 253: 615-623.
[1130] Green, (2000) Trends Biochem Sci 25:59-63.
[1131] Green et al., (1986) Ann Rev Biochem 55:569-597.
[1132] Gritz et al. (1983) Gene 25:179.
[1133] Grotewold et al. (1991) Proc. Natl. Acad. Sci. USA 88: 4587-4591.
[1134] Groves, et al. (1999) Curr. Opin. Struct. Biol. 9: 383-389.
[1135] Gruber et al. (1993) Vectors for Plant Transformation, in Methods in Plant Molecular Biology, Glich et al. eds, pp. 89-119, CRC Press.
[1136] Guan & Scandalios (1996) J. Mol. Evol. 42: 570-579.
[1137] Guo et al. (2000) EMBO J. 19: 6891-6899.
[1138] Gyuris et al. (1993) Cell 1993, 75: 791-803.
[1139] Hake et al. (1995) Philos Trans. R Soc. Lond. B Biol. Sci. 350: 45-51.
[1140] Hammerschmidt (1999) Ann. Rev. Phytopathol. 37: 285-306.
[1141] Hannig et al. (1995) Bioessays 17: 915-919.
[1142] Haraven et al. (1996) Cell 84: 735-44.
[1143] Harlow & Lane, (1988) Antibodies: A Laboratory Manual, Cold Spring Harbor Laboratory. Press, Cold Spring Harbor, N.Y., United States of America.
[1144] Harper et al. (1991) Science 252: 951-954.
[1145] Harris et al. (1999) Plant Physiol. 121: 609-617.
[1146] Hartwig (1995) Protein Profile 2: 703-800.
[1147] Hassan et al. (1995) Biochem. Biophys. Res. Commun. 211: 54-49.
[1148] Hatzfeld (1999) Int. Rev. Cytol. 186: 179-224.
[1149] Hayashi et al. (2001) J. Biol. Chem. 276: 43400-43406.
[1150] Haydon & Guest (1991) FEMS Microbiol. Lett. 79: 291-296.
[1151] Hedden & Kamiya (1977) Annual Rev. Plant Physiol. Plant Mol. Biol. 48: 431.
[1152] Henikoff & Henikoff (1989) Proc. Natl. Acad. Sci. USA, 89:10915.
[1153] Hiei et al. (1994) Plant J. 6:271.
[1154] Hiei et al., (1997) Plant Mol Biol 35:205-18.
[1155] Higgins et al. (1988) Gene 73:237.
[1156] Higgins et al. (1989) CABIOS 5:151.
[1157] Higo & Higo (1996) Plant Mol. Biol. 30: 505-521.
[1158] Hinchee et al. (1988) Bio/Technology 6:915.
[1159] Hoekema (1985) in The Binary Plant Vector System, Offset-drukkerij Kanters B.V.
[1160] Holk et al. (1996) Plant Mol. Biol. 31: 1153-1161.
[1161] Hong et al. (2001) Plant Cell 13: 755-768.
[1162] Huang et al. (1992) CABIOS 8:155.
[1163] Huang et al. (1996) Plant Mol. Biol. 33:125.
[1164] Huber et al. (1997) Cell 90: 871-882.
[1165] Hudspeth & Grula, (1989) Plant Molec Biol 12:579-589.
[1166] Hurst (1995) Protein Prof 2: 105-168.
[1167] Imhof & Wolffe (1999) Biochemistry 38: 13085-13093.
[1168] Ishikawa et al. (2001) Plant J. 27: 89-99.
[1169] Janssens & Goris (2001) Biochem J. 353: 417-439.
[1170] Jasencakova et al. (2001) Chromosoma 110: 83-92.
[1171] Jasinski et al. (2001) Plant Cell 13: 1095-107.
[1172] Jia et al. (2000) Plant Sci. 155:115-122.
[1173] Jin & Martin (1999) Plant Mol. Biol. 4: 577-585.
[1174] Jobling & Gehrke (1987) Nature 325:622.
[1175] John et al. (2001) Protoplasma 216: 119-142.
[1176] Johnson et al. (1997) J. Biol. Chem. 272: 7106-7113.
[1177] Jorgensen et al., (1996) Plant Mol Biol 31:957-973.
[1178] Josefsson et al. (1987) J. Biol. Chem. 262:12196.
[1179] Kagedal et al. (2001) Biochem J. 359: 335-343.
[1180] Kaitna et al. (2000) Curr. Biol. 10:1172-1181.
[1181] Kang et al. (1995) Plant Mol. Biol. 29:1-10.
[1182] Kang et al. (1997) Mol. Cells 7: 45-51.
[1183] Kao et al. (2000) Biochem. Biophys. Res. Commun. 267: 201-207.
[1184] Karlin & Altschul (1990) Proc. Natl. Acad. Sci. USA 87:2264.
[1185] Karlin & Altschul (1993) Proc. Natl. Acad. Sci. USA 90:5873.
[1186] Kato & Dang (1992) FASEB J. 6: 3065-3072.
[1187] Kawalleck et al. (1992) Proc. Natl. Acad. Sci. USA 89:4713-7.
[1188] Keegan et al., (1986) Science 231:699-704.
[1189] Kehres et al. (1998) Microb. Comp. Genomics 3: 151-169.
[1190] Kelly (1999) Altern. Med. Rev. 4: 249-265.
[1191] Kempin et al., (1997) Nature 389:802-803.
[1192] Kerstetter et al. (1997) Development 124: 3045-3054.
[1193] Kidou et al. (1993) FEBS Lett. 332: 282-286.
[1194] Kim et al. (2001) Plant Physiol. 127:1243-1255.
[1195] Kitade et al. (1999) Nucl. Acids Symp. Ser. 42: 25-26.
[1196] Klein et al. (1988) Bio/Technology 6:559.
[1197] Kline et al. (1987) Nature 327:70.
[1198] Knauf et al. (1983) Analysis of Host Range Expression by Agrobacterium, in Molecular Genetics of the Bacteria-Plant Interaction, Puhler, (ed.), Springer-Verlag.
[1199] Kobe et al. (1994) Trends Biochem. Sci. 19: 415-421.
[1200] Kong & Steinbiss (1998) Arch Virol 143:1791-1799.
[1201] Koonin (1993) J. Mol. Biol. 229: 1165-1174.
[1202] Korfhage et al. (1994) Plant Cell 6: 695-708.
[1203] Kossman & Lloyd (2000) Crit. Rev. Biochem. Mol. Biol. 35:141-196.
[1204] Kostyal et al. (1998) Clin. Exp. Immunol. 112: 355-362.
[1205] Kosugi & Ohashi (2002) Plant Physiol. 128: 833-843.
[1206] Koziel et al. (1993) Biotechnology 11:194.
[1207] Krause et al. (1990) Cell 63: 907-919.
[1208] Kruse et al. (1995) Planta 196: 796-803.
[1209] Kyozuka et al. (2000) Plant Cell Physiol. 41:710-718.
[1210] Kyte & Doolittle, (1982) J Mol Biol 157:105-132.
[1211] Lacombe et al. (2001) Science 292: 1486-1487.
[1212] Lamb & Dixon (1997) Ann. Rev. Plant Biol. 48:251.
[1213] Landolt (1986) Biosystematic Investigation on the Family of Duckweeds: The family of Lemnaceae—A Monograph Study, Geobatanischen Institut ETH, Stiftung Rubel, Zurich.
[1214] Landschulz et al. (1988) Science 240: 1759-1764.
[1215] Langenkamper et al. (2001) J. Exp. Bot. 52: 1545-1554.
[1216] Laursen et al. (1994) Plant Mol. Biol. 24:51.
[1217] Lebel et al., (1998) Plant J 16:223-233.
[1218] Lechner et al. (1996) Biochim Biophys Acta 1296: 181-188.
[1219] Lee et al. (1994) Plant Mol. Biol. 26:1981.
[1220] Lefterov et al. (2000) FASEB J. 14: 1837-1847.
[1221] Lenny et al. (1997) Mol. Biol. Rep. 24: 157-168.
[1222] Le Saux et al. (1996) J. Bacteriol. 178: 3308-3313.
[1223] Leslie et al. (2001) Toxicology 167: 3-23.
[1224] Li & Komatsu (2000) Eur. J. Biochem. 267: 737-745.
[1225] Li & Nam (2002) Science 295:1299-1301.
[1226] Li et al. (2001) Proc. Natl. Acad. Sci. USA 98: 5916-5921.
[1227] Lim et al. (1999) Plant Physiol. 120: 1193-1204.
[1228] Lim et al. (2000) Plant Mol. Biol. 44: 513-527.
[1229] Lincoln et al. (1994) Plant Cell 6: 1859-1876.
[1230] Lindholm et al. (2000) Mech. Dev. 93:169-173.
[1231] Lindsey et al. (1993) Transgen. Res. 2: 3347.
[1232] Liu et al. (1992) Antiviral Res. 19: 247-265.
[1233] Liu et al., (1999) Genome Res 9:859-867.
[1234] Logemann et al., (1989) Plant Cell 1:151-158.
[1235] Lommel et al. (1991) Virology 181:382.
[1236] Lopez-Dee et al. (1999) Dev. Genet. 25: 237-244.
[1237] Lorz et al. (1985) Mol. Gen. Genet. 199: 178.
[1238] Ma et al. (1988) Nature 334: 631.
[1239] Macejak & Sarnow, (1991) Nature 353:90-94.
[1240] Magyar et al. (2000) FEBS Lett. 486: 79-87.
[1241] Maki et al. (1993) Methods in Plant Molecular Biology, Glich et al. eds, pp. 67-88, CRC Press.
[1242] Malz & Sauter (1999) Plant Mol. Biol. 40: 985-995.
[1243] Manjunath et al. (1997) Plant Mol. Biol. 33:97.
[1244] Mann & Affolter (1998) Curr. Opin. Genet Dev. 8: 423-429.
[1245] Mannervick (1999) Bioessays 21: 267-270.
[1246] Martinez et al. (1989) J. Mol. Biol. 208:551.
[1247] Martinez et al. (2000) Plant Physiol. 122: 757-766.
[1248] Massey (2000) Biochem. Soc. Trans. 28: 283-296.
[1249] Mayer et al. (2001) Phytochemistry 58: 33-41.
[1250] Mayo, (1987) The Theory of Plant Breeding, Second Edition, Clarendon Press, New York, N.Y., United States of America.
[1251] McBride et al. (1994) Proc. Natl. Acad. Sci. USA 91: 7301.
[1252] McBride et al. (1990) Plant Mol. Biol. 14: 266.
[1253] McCabe et al. (1988) Bio/Technology 6:923.
[1254] McElroy et al., (1990) Plant Cell 2:163-71.
[1255] McEwen, et al. (2001) Mol. Biol. Cell. 12: 2776-89.
[1256] McLeod (1986) Bioessays 6: 208-212.
[1257] Medina et al. (2001) Plant Physiol. 125:1655.
[1258] Merkle et al. (1994) Plant J. 6: 555-565.
[1259] Messing & Vierra (1982) Gene 19:259.
[1260] Miao & Lam, (1995) Plant J 7:359-365.
[1261] Michalak et al. (1992) Biochem. J. 285: 681-692.
[1262] Michalak et al. (1998) Biochem. Cell. Biol. 76: 779-785.
[1263] Michelis et al. (2000) Plant Mol. Biol. 44: 487498.
[1264] Mikami et al. (1998) Plant J. 15: 563-568.
[1265] Moon et al. (1999) Plant Physiol. 120: 1193-1204.
[1266] Moons et al. (1998) Plant J. 15: 89-98.
[1267] Morita et al. (2001) Curr. Pharm. Biotechnol. 2: 257-267.
[1268] Muehlbauer et al, (1999) Plant Physiol. 119: 651-62.
[1269] Mukumoto et al., (1993) Plant Mol Biol 23: 995-1003.
[1270] Muller et al. (1995) Nature 374: 727-730.
[1271] Mundy & Chua (1988) EMBO J. 7: 2279-2286.
[1272] Munro & Pelham (1987) Cell 48: 899-907.
[1273] Munster et al. (2001) Gene 262:1-130.
[1274] Murre et al. (1989) Cell 56: 777-783.
[1275] Muslin & Xing (2000) Cell Signal 12: 703-709.
[1276] Myers & Miller (1988) CABIOS 4:11.
[1277] Nagamara-lnoue et al. (2001) Int. Rev. Immunol. 20: 83-105.
[1278] Nakamura et al. (1996) Plant Mol. Biol. 30: 381-385.
[1279] Needleman & Wunsch (1970) J. Mol. Biol. 48:443.
[1280] Negrotto et al., (2000) Plant Cell Reports 19:798-803.
[1281] Nelson et al. (1997) Plant Physiol. 114: 29-37.
[1282] Nepveu (2001) Gene 270: 1-15.
[1283] Ng & Yanofsky (2001) Nat. Rev. Genet. 2: 186-195.
[1284] Nielsen et al. (1986) J. Biol. Chem. 261: 3661-3669.
[1285] Norris et al., (1993) Plant Mol Biol 21:895-906.
[1286] Nurnberger & Scheel (2001) Trends Plant Sci. 6: 372-379.
[1287] O'Connell et al. (2001) J. Biol. Chem. 276: 43065-43073.
[1288] Odagaki et al. (1999) Structure Fold Des. 7: 399-411.
[1289] Ohtsuka et al., (1985) J. Biol. Chem. 260:2605-2608.
[1290] Oliveira et al. (2001) Braz. J. Med. Biol. Res. 34: 567-575.
[1291] Ono et al. (1996) Plant Physiol. 112: 483-491.
[1292] Ono et al. (2001) Proc. Natl. Acad. Sci. USA 98: 759-764.
[1293] Oppenheimer et al. (1991) Cell 67: 483-493.
[1294] Orzaez & Granell (1997) FEBS Lett. 404: 275-278.
[1295] O'Shea et al. (1989) Science 243: 538-542.
[1296] Pacciotti et al. (1985) Bio/Technology 3:241.
[1297] Panavas et al. (1999) Plant Mol. Biol. 40: 237-248.
[1298] Park et al. (1985) J. Plant Biol., 38:365.
[1299] Park et al. (1998) EMBO J. 17: 859-867.
[1300] Pascual et al. (2000) J. Mol. Biol. 304: 723-729.
[1301] Paszkowski et al. (1984) EMBO J. 3:2717.
[1302] PCT International Publication No. WO 93/05163
[1303] PCT International Publication No. WO 93/07278
[1304] PCT International Publication WO 93/21335
[1305] PCT International Publication WO 94/00977
[1306] PCT International Publication No. WO 94/20627
[1307] PCT International Publication No. WO 95/16783
[1308] PCT International Publication WO 95/19431
[1309] PCT International Publication WO 96/06166
[1310] PCT International Publication WO 98/54311
[1311] PCT International Publication WO 99/32619
[1312] PCT International Publication WO 99/53050
[1313] PCT International Publication WO 99/61631
[1314] PCT International Publication No. WO 00/07210
[1315] PCT International Publication No. WO 00/760067
[1316] PCT International Publication No. WO 01/07618
[1317] Pearson & Lipman (1988) Proc. Natl. Acad. Sci. USA 85:2444.
[1318] Pearson et al. (1994) Meth. Mol. Biol. 24:307.
[1319] Peifer et al. (1990) Cell 63:1167-76.
[1320] Peifer et al. (1994) Cell 76:789-791.
[1321] Pelham (1990) Trends Biochem. Sci. 15: 483-486.
[1322] Perrin (2001) Curr. Biol. 11: R213-R216.
[1323] Persson et al. (2001) Plant Physiol. 126: 1092-1104.
[1324] Phillips et al. (1988) in Corn and Corn Improvement, 3^{rd} ed, Sprague et al. eds., Amer. Soc of Agronomy.
[1325] Picard et al., (1988) Cell 54: 1073-1080.
[1326] Pih et al. (1999) Mol. Cells 9: 84-90.
[1327] Ponting (2000) Trends Biochem. Sci. 25: 423-426.
[1328] Ponting & Parker (1996) Protein Sci. 5: 162-166.
[1329] Postma-Haarsma et al. (2002) Plant Mol Biol 48: 423-41.
[1330] Potrykus (1985) Trends Biotech. 7:269.
[1331] Potuschak & Doerner (2001) Curr. Opin. Plant Biol. 4: 501-506.
[1332] Powell et al., (1989) Proc. Natl. Acad. Sci. USA 86:6949-6952.
[1333] Presley et al. (2002) Nature 417: 187-193.
[1334] Purugganan et al. (1995) Genetics 140: 345-356.
[1335] Ratajczak (2000) Biochim Biophys Acta 1465: 17-36.
[1336] Raven et al. (1999) Biology of Plants, Freeman/Worth.
[1337] Rea et al. (1998) Annu. Rev. Plant Physiol. Plant Mol. Biol. 49: 727-760.
[1338] Reddy (2001) Int. Rev. Cytol. 204: 97-178.
[1339] Redei & Koncz, (1992) in Methods in Arabidopsis Research (Koncz C, Chua N—H & Schell J, eds.) World Scientific Press, River Edge, N.J., United States of America, pp. 16-82.
[1340] Reed et al., (2001) In Vitro Cell Dev Biol-Plant 37:127-132.
[1341] Reichelt et al. (1999) Plant J. 19: 555-567.
[1342] Reiser et al. (1995) Cell 83:735.
[1343] Reizer et al. (1991) Mol. Microbiol. 5: 1081-1089.
[1344] Riechmann et al. (1994) Nucl. Acids Res. 22: 749-755.
[1345] Riechmann & Meyerowitz (1997) Bio. Chem. 378: 1079-1101.
[1346] Riggs et al. (1986) Proc. Natl. Acad. Sci. USA 83:5602.
[1347] Ritz et al. (2001) J. Biol. Chem. 276: 22273-22277.
[1348] Robertson & Chandler (1992) Plant Mol. Biol. 19: 1031-1044.
[1349] Robins et al. (1998) J. Med. Chem. 41: 3857-3864.
[1350] Robles et al. (1997) J. Neurosci. Res. 47: 90-97.
[1351] Rogers et al., (1985) Proc. Natl. Acad. Sci. USA 82:6512-6516.
[1352] Rogers et al. (2001) J. Biol. Chem. 276: 30914-30922.
[1353] Rohrmeier & Lehle, (1993) Plant Mol Biol 22:783-792.
[1354] Roosens et al. (2000) Biochim. Biophys. Acta 1463: 470-476.
[1355] Rossolini et al., (1994) Mol Cell Probes 8:91-98.
[1356] Roth et al., (1991) Plant Cell 3:317-325.
[1357] Rothstein et al. (1987) Gene 53:153.
[1358] Ruberti et al. (1991) EMBO J. 10: 1787-1791.
[1359] Sabelli et al. (1999) Mol. Gen. Genet. 261: 820-830.
[1360] Saijo et al. (2001) Plant Cell Physiol. 42: 1228-1233.
[1361] Salvucci & Ogren (1996) Phosynthesis Res. 47: (1) 1-11.
[1362] Salvucci et al. (2001) Plant Physiol. 127: 1053-1064.
[1363] Sanchez-Fernandez et al. (2001) J. Biol. Chem. 276: 30231-30244.
[1364] Sanderfoot et al. (1999) Plant Physiol. 121: 929-938.
[1365] Sanford et al. (1987) Particulate Sci. Tech. 5:27.
[1366] Sankaranarayanan et al. (1996) Nat. Struct. Biol. 3: 596-603.
[1367] Saraste et al. (1990) Trends Biochem. Sci. 15: 430434.
[1368] Sato et al. (1997) J. Biol. Chem. 272:24530-5.
[1369] Sauter et al. (1995) Plant J. 7: 623-632.
[1370] Savidge et al. (1995) Plant Cell 7: 721-33.
[1371] Sazer & Dasso (2000) J. Cell Sci. 113: 111.1-1118.
[1372] Scharfmann et al., (1991) Proc Natl Acad Sci U SA 88:4626-4630.
[1373] Schledzewski et al. (1999) J. Mol. Evol. 48: 770-778.
[1374] Schmidhauser & Helinski (1985) J. Bacteriol. 164:446.
[1375] Schneeberger et al. (1998) Development 125: 2857-2865.
[1376] Schocher et al., (1986) Bio/Technology 4:1093-1096.
[1377] Schofield (1987) Trends Neurosci. 10: 3-6.
[1378] Schultz et al. (1998) Plant Cell 10: 837-47.
[1379] Schwab et al. (2001) Phytochemistry 56: 407-415.
[1380] Schwartz et al. (1999) Proc. Natl. Acad. Sci. USA 96: 4680-4685.
[1381] Sehnke et al. (2000) Plant Physiol. 122: 235-242.
[1382] Sganga et al. (1992) Proc. Natl. Acad. Sci. USA 89: 6328-6332.
[1383] Shalev et al. (2001) J. Biol. Chem. 276: 34948-34957.
[1384] Shank et al. (2001) Plant Physiol. 126: 267-277.
[1385] Shcherban et al. (1995) Proc. Natl. Acad. Sci. USA 92: 9245-9249.
[1386] Sheridan et al. (1996) Genetics 142:1009.
[1387] Shibuya et al. (2000) J. Exp. Bot. 51: 2067-2073.
[1388] Shimamoto et al. (1989) Nature 338:274.
[1389] Shinshi et al., (1990) Plant Mol Biol 14:357-368.
[1390] Silverstone et al., (1998) Plant Cell 10:155-169.
[1391] Singh, (1986) Breeding for Resistance to Diseases and Insect Pests, Springer-Verlag, New York, N.Y., United States of America.
[1392] Singh et al. (1998) J. Plant. Physiol. 153: 316-323.
[1393] Sinha et al. (1993) Genes Dev. 7: 787-795.
[1394] Sjodahl et al. (1995) Planta 197:264.
[1395] Skuzeski et al. (1990) Plant Mol. Biol., 15: 65.
[1396] Smilie (1979) Trends Biochem. Sci. 4: 151-155.
[1397] Smith et al., (2000) Nature 407:319-320.
[1398] Smith & Waterman (1981) Adv. Appl. Math. 2: 482.
[1399] Smith et al. (1997) Ann. Rev. Plant Biol. 48: 67.
[1400] Solocombe et al. (1994) Plant Physiol. 104:1167.
[1401] Sontag (2001) Cell Signal 13: 7-16.
[1402] Spencer et al. (1990) Theor. Appl. Genet. 79:625.
[1403] Staub et al. (1992) Plant Cell 4:39.
[1404] Staub et al. (1993) EMBO J. 12:601.
[1405] Stintzi et al. (1993) Biochimie. 75: 687-706.
[1406] Sukhapinda et al. (1987) Plant Mol. Bioi. 8:209.
[1407] Sulo & Martin (1993) J. Biol. Chem. 268: 17634-17639.
[1408] Sung et al. (2001) Mol. Cells 11: 352-359.
[1409] Suss et al. (1993) Proc. Natl. Acad. Sci. USA 90: 5514-5518.
[1410] Svab et al. (1990) Proc. Natl. Acad. Sci. USA 87:8526.
[1411] Takahashi et al. (1994) Plant Mol. Biol. 26: 339-352.
[1412] Takamori et al. (2000) Nature 407: 189-194.
[1413] Tanaka et al. (1997) Plant Mol. Biol. 35: 981-986.
[1414] Tapon & Hall (1997) Curr. Opin. Cell. Biol. 9: 86-92.
[1415] Taylor et al., (1993) Plant Cell Rep 12:491-495.
[1416] Theissen et al. (2000) Plant Mol. Biol. 42: 115-149.
[1417] Thompson et al. (1987) EMBO J. 6:2519.
[1418] Tomes et al. (1995) Plant Cell, Tissue and Organ Culture: Fundamental Methods, Springer-Verlag.
[1419] Triezenberg et al., (1988) Genes Dev 2:718-729.
[1420] Trimarchi & Lees (2002) Nat Rev. Mol. Cell. Biol. 3:11-20.
[1421] Tsutsumi et al. (1994) Gene 141: 215-220.
[1422] Turner et al., (1987) Cold Spring Harb Symp Quant Biol LII:123-133.
[1423] Udaka et al. (2000) J. Nutr. Sci. VitaminoL. (Tokyo) 46: 84-90.
[1424] Uknes et al., (1992) Plant Cell 4:645-656.
[1425] Umeda et al. (1999) Mol. Gen. Genet. 262: 230-238.
[1426] Unger et al., (1989) Plant Mol Biol 13:411-418.
[1427] Urao et al. (1996) Plant Mol. Biol. 32:571.
[1428] U.S. Patent Application No. 20010049831
[1429] U.S. Pat. No. 4,554,101
[1430] U.S. Pat. No. 4,940,935
[1431] U.S. Pat. No. 4,945,050
[1432] U.S. Pat. No. 4,987,071
[1433] U.S. Pat. No. 5,036,006
[1434] U.S. Pat. No. 5,100,792
[1435] U.S. Pat. No. 5,188,642
[1436] U.S. Pat. No. 5,270,163
[1437] U.S. Pat. No. 5,350,689
[1438] U.S. Pat. No. 5,451,513
[1439] U.S. Pat. No. 5,466,785
[1440] U.S. Pat. No. 5,491,288
[1441] U.S. Pat. No. 5,501,967
[1442] U.S. Pat. No. 5,523,311
[1443] U.S. Pat. No. 5,545,817
[1444] U.S. Pat. No. 5,545,818
[1445] U.S. Pat. No. 5,591,616
[1446] U.S. Pat. No. 5,614,395
[1447] U.S. Pat. No. 5,639,949
[1448] U.S. Pat. No. 5,767,378
[1449] U.S. Pat. No. 5,929,226
[1450] U.S. Pat. No. 5,990,386
[1451] U.S. Pat. No. 5,994,629
[1452] U.S. Pat. No. 6,087,175
[1453] U.S. Pat. No. 6,369,298
[1454] Van Breusegem et al. (1994) Planta 193: 57-66.
[1455] Van den Broeck et al., (1985) Nature 313:358-363.
[1456] van der Krol et al., (1991) In Antisense nucleic acids and Proteins (Joseph M & van der Krol A, eds.) Marcel Dekker Inc, New York, N.Y., United States of America, pp. 125-141.
[1457] van Hemert et al. (2001) Bioessays 23: 936-946.
[1458] van Hille et al. (1993) Biochem Biophys Res. Commun. 197: 15-21.
[1459] Vasil et al. (1989) Mol. Microbiol. 3:371.
[1460] Vasil et al., (1992) Bio/Technology 10:667-674.
[1461] Vasil et al. (1993) Biotechnology 11:1553.
[1462] Vazquez-Tello et al. (1998) Mol. Gen. Genet. 257: 157-166.
[1463] Villalba et al. (1993) Eur. J. Biochem. 216: 863-869.
[1464] Vollbrecht et al. (1991) Nature 350: 241-243.
[1465] Vos et al. (2000) Plant Cell 12: 979-990.
[1466] Wadzinski et al. (1993) Mol. Cell Biol. 13: 2822-2834.
[1467] Walter et al. (1990) J. Biol. Chem. 265: 14016-22.
[1468] Warner et al., (1993) Plant J 3:191-201.
[1469] Wasmann et al., (1986) Mol Gen Genet 205:446-453.
[1470] Watanabe et al. (1994) J. Biol. Chem. 269: 7744-7749.
[1471] Waterhouse et al., (1998) Proc Natl Acad Sci USA 95:13959-13964.
[1472] Weeks et al. (1993) Plant Physiol. 102: 1077.
[1473] Weissinger et al. (1988) Ann. Rev. Genet. 22: 421.
[1474] Welsh, (1981) Fundamentals of Plant Genetics and Breeding, John Wiley & Sons, New York, N.Y., United States of America.
[1475] Wen et al. (1989) Nucl. Acids Res. 17: 9490.
[1476] White et al. (1990) Nucl. Acids Res. 18:1062.
[1477] Williams et al., (1993) J Clin Invest 92:503-508.
[1478] Williams-Carrier et al. (1997) Development 124: 3737-3745.
[1479] Winge et al. (1997) Plant Mol. Biol. 35: 483-495.
[1480] Wolf & Borchardt (1991) J. Med. Chem. 34: 1521-1530.
[1481] Wood, (1983) Crop Breeding, American Society of Agronomy, Madison, Wis., United States of America.
[1482] Wricke & Weber, (1986) Quantitative Genetics and Selection Plant Breeding, Walter de Gruyter and Co., Berlin, Germany.
[1483] Wu et al. (1995) Mol. Cell. Biol. 15: 2536-2546.
[1484] Xia et al. (1996) Plant J. 10: 761-769.
[1485] Xiong et al. (2001a) Genes Dev. 15: 1971-1984.
[1486] Xiong et al. (2001b) Mol. Plant Microbe Interact. 14: 685-692.
[1487] Xu et al., (1993) Plant Mol Biol 22:573-588.
[1488] Yamaguchi-Shinozaki et al. (1990) Plant Mol. Biol. 14: 29-39.
[1489] Yao et al. (2001) Proc. Natl. Acad. Sci. USA 98: 1306-1311.
[1490] Yazaki et al. (2001) J. Exp. Bot. 52: 877-9.
[1491] Yokota et al. (1999a) Plant Physiol. 119: 231-240.
[1492] Yokota et al. (1999b) Plant Physiol. 121: 525-534.
[1493] York et al. (1994) Biochemistry 33: 13164-13171.
[1494] Yucel (2000) J. Cell. Biol. 150: 1-11.
[1495] Zhang et al. (1998) EMBO J. 17: 6404-6411.
[1496] Zhao & Last, (1995) J. Biol. Chem. 270: 6081-6087.
[1497] Zhao et al., (2000) Plant Mol Biol 44:789-98.
[1498] Zhao et al. (2001) EMBO J. 20: 2315-2325.
[1499] Zhong et al. (1996) Mol. Gen. Genet. 251:196.
[1500] Zhu & Xiao (1998) Nucl. Acids Res. 26: 5402-5408.
[1501] Zhu et al., (1999) Proc Natl Acad Sci USA 96:8768-8773.
[1502] Zhu et al. (2001) Plant Physiol. Biochem. 39: 221-242.
[1503] Zilliacus et al. (2001) Mol. Endocrinol. 15: 501-511.
[1504] Zollman, et al. (1994) Proc. Natl. Acad. Sci. USA 91: 10717-21.

[1505] Those skilled in the art will recognize, or be able to ascertain, using no more than routine experimentation, numerous equivalents to the specific embodiments described specifically herein. Such equivalents are intended to be encompassed in the scope of the following claims.

What is claimed is:

1. An isolated nucleic acid molecule encoding a cell proliferation-related polypeptide, wherein the polypeptide binds in a yeast two hybrid assay to a fragment of a protein selected from the group consisting of OsE2F1 (SEQ ID NO: 194), Os018989-4003 (SEQ ID NO: 2), OsE2F2 (SEQ ID NO: 10), OsS49462 (SEQ ID NO: 206), OsCYCOS2 (SEQ ID NO: 210), OsMADS45 (SEQ ID NO: 202), OsRAP1B (SEQ ID NO: 244), OsMADS6 (SEQ ID NO: 236), OsFDRMADS8 (SEQ ID NO: 228), OsMADS3 (SEQ ID NO: 232), OsMADS5 (SEQ ID NO: 234), OsMADS15 (SEQ ID NO: 240), OsHOS59 (SEQ ID NO: 258), OsGF14-c (SEQ ID NO: 278), OsDAD1 (SEQ ID NO: 292), Os006819-2510 (SEQ ID NO: 296), OsCRTC (SEQ ID NO: 300), OsSGT1 (SEQ ID NO: 310), OsERP (SEQ ID NO: 312), OsCHIB1 (SEQ ID NO: 318), OsCS (SEQ ID NO: 322), OsPP2A-2 (SEQ ID NO: 330), and OsCAA90866 (SEQ ID NO: 336).

2. The isolated nucleic acid molecule of claim 1, wherein the isolated nucleic acid molecule is derived from rice (Oryza sativa).

3. The isolated nucleic acid molecule of claim 1, wherein the isolated nucleic acid molecule comprises a nucleic acid sequence selected from the group consisting of odd numbered SEQ ID NOs:1-191.

4. The isolated nucleic acid molecule of claim 3, wherein the isolated nucleic acid molecule comprises a nucleic acid sequence of one of odd numbered SEQ ID NOs: 1-7 and the protein comprises an amino acid sequence of SEQ ID NO: 194.

5. The isolated nucleic acid molecule of claim 3, wherein the isolated nucleic acid molecule comprises a nucleic acid sequence of one of SEQ ID NOs: 9 and 11 and the protein comprises an amino acid sequence of SEQ ID NO: 2.

6. The isolated nucleic acid molecule of claim 3, wherein the isolated nucleic acid molecule comprises a nucleic acid sequence of one of SEQ ID NOs: 1 and 13 and the protein comprises an amino acid sequence of SEQ ID NO: 10.

7. The isolated nucleic acid molecule of claim 3, wherein the isolated Nucleic acid molecule comprises a nucleic acid sequence of one of odd numbered SEQ ID NOs: 15-21 and the protein comprises an amino acid sequence of SEQ ID NO: 206.

8. The isolated nucleic acid molecule of claim 3, wherein the isolated nucleic acid molecule comprises a nucleic acid sequence of one of odd numbered SEQ ID NOs: 15, 17, 23-53 and the protein comprises an amino acid sequence of SEQ ID NO: 210.

9. The isolated nucleic acid molecule of claim 3, wherein the isolated nucleic acid molecule comprises a nucleic acid sequence of SEQ ID NO: 55 and the protein comprises an amino acid sequence of SEQ ID NO: 202.

10. The isolated nucleic acid molecule of claim 3, wherein the isolated nucleic acid molecule comprises a nucleic acid sequence of SEQ ID NO: 57 and the protein comprises an amino acid sequence of SEQ ID NO: 244.

11. The isolated nucleic acid molecule of claim 3, wherein the isolated nucleic acid molecule comprises a nucleic acid sequence of SEQ ID NO: 59 and the protein comprises an amino acid sequence of SEQ ID NO: 236.

12. The isolated nucleic acid molecule of claim 3, wherein the isolated nucleic acid molecule comprises a nucleic acid sequence of SEQ ID NO: 61 and the protein comprises an amino acid sequence of SEQ ID NO: 232.

13. The isolated nucleic acid molecule of claim 3, wherein the isolated nucleic acid molecule comprises a nucleic acid sequence of SEQ ID NO: 63 and the protein comprises an amino acid sequence of SEQ ID NO: 234.

14. The isolated nucleic acid molecule of claim 3, wherein the isolated nucleic acid molecule comprises a nucleic acid sequence of SEQ ID NO: 65 and the protein comprises an amino acid sequence of SEQ ID NO: 240.

15. The isolated nucleic acid molecule of claim 3, wherein the isolated nucleic acid molecule comprises a nucleic acid sequence of one of odd numbered SEQ ID NOs: 67-79 and the protein comprises an amino acid sequence of SEQ ID NO: 258.

16. The isolated nucleic acid molecule of claim 3, wherein the isolated nucleic acid molecule comprises a nucleic acid sequence of SEQ ID NO: 81 and the protein comprises an amino acid sequence of SEQ ID NO: 260.

17. The isolated nucleic acid molecule of claim 3, wherein the isolated nucleic acid molecule comprises a nucleic acid sequence of one of odd numbered SEQ ID NOs: 83-97 and the protein comprises an amino acid sequence of SEQ ID NO: 278.

18. The isolated nucleic acid molecule of claim 3, wherein the isolated nucleic acid molecule comprises a nucleic acid sequence of one of SEQ ID NOs: 89 and 99 and the protein comprises an amino acid sequence of SEQ ID NO: 286.

19. The isolated nucleic acid molecule of claim 3, wherein the isolated nucleic acid molecule comprises a nucleic acid sequence of one of odd numbered SEQ ID NOs: 101-105 and the protein comprises an amino acid sequence of SEQ ID NO: 296.

20. The isolated nucleic acid molecule of claim 3, wherein the isolated nucleic acid molecule comprises a nucleic acid sequence of SEQ ID NO: 107 and the protein comprises an amino acid sequence of SEQ ID NO: 300.

21. The isolated nucleic acid molecule of claim 3, wherein the isolated nucleic acid molecule comprises a nucleic acid sequence of SEQ ID NO: 109 and the protein comprises an amino acid sequence of SEQ ID NO: 304.

22. The isolated nucleic acid molecule of claim 3, wherein the isolated nucleic acid molecule comprises a nucleic acid sequence of one of odd numbered SEQ ID NOs: 111-123 and the protein comprises an amino acid sequence of SEQ-ID NO: 310.

23. The isolated nucleic acid molecule of claim 3, wherein the isolated nucleic acid molecule comprises a nucleic acid sequence of one of odd numbered SEQ ID NOs: 125-147 and the protein comprises an amino acid sequence of SEQ ID NO: 312.

24. The isolated nucleic acid molecule of claim 3, wherein the isolated nucleic acid molecule comprises a nucleic acid sequence of one of odd numbered SEQ ID NOs: 151-157 and the protein comprises an amino acid sequence of SEQ ID NO: 318.

25. The isolated nucleic acid molecule of claim 3, wherein the isolated nucleic acid molecule comprises a nucleic acid sequence of one of odd numbered SEQ ID NOs: 159-175 and the protein comprises an amino acid sequence of SEQ ID NO: 322.

26. The isolated nucleic acid molecule of claim 3, wherein the isolated nucleic acid molecule comprises a nucleic acid sequence of one of odd numbered SEQ ID NOs: 177-185 and the protein comprises an amino acid sequence of SEQ ID NO: 330.

27. The isolated nucleic acid molecule of claim 3, wherein the isolated nucleic acid molecule comprises a nucleic acid sequence of one of odd numbered SEQ ID NOs: 177, 187-191 and the protein comprises an amino acid sequence of SEQ ID NO: 336.

28. An isolated nucleic acid molecule encoding a cell proliferation-related polypeptide, wherein the nucleic acid molecule is selected from the group consisting of:
(a) a nucleic acid molecule encoding a polypeptide comprising an amino acid sequence of one of even numbered SEQ ID NOs: 2-192;
(b) a nucleic acid molecule comprising a nucleic acid sequence of one of odd numbered SEQ ID NOs:1-191;
(c) a nucleic acid molecule that has a nucleic acid sequence at least 90% identical to the nucleic acid sequence of the nucleic acid molecule of (a) or (b);
(d) a nucleic acid molecule that hybridizes to (a) or (b) under conditions of hybridization selected from the group consisting of:
(i) 7% sodium dodecyl sulfate (SDS), 0.5 M NaPO₄, 1 mM ethylenediamine tetraacetic acid (EDTA) at 50° C. with a final wash in 2× standard saline citrate (SSC), 0.1% SDS at 50° C.;
(ii) 7% SDS, 0.5 M NaPO₄, 1 mM EDTA at 50° C. with a final wash in 1×SSC, 0.1% SDS at 50° C.;
(iii) 7% SDS, 0.5 M NaPO₄, 1 mM EDTA at 50° C. with a final wash in 0.5×SSC, 0.1% SDS at 50° C.;
(iv) 7% sodium dodecyl sulfate (SDS), 0.5 M NaPO₄, 1 mM EDTA at 50° C. with a final wash in 0.1×SSC, 0.1% SDS at 50° C.; and
(v) 7% sodium dodecyl sulfate (SDS), 0.5 M NaPO₄, 1 mM EDTA at 50° C. with a final wash in 0.1×SSC, 0.1% SDS at 65° C.;
(e) a nucleic acid molecule comprising a nucleic acid sequence fully complementary to (a); and
(f) a nucleic acid molecule comprising a nucleic acid sequence that is the full reverse complement of (a).

29. An isolated cell proliferation-related polypeptide encoded by the isolated nucleic acid molecule of claim 28, or a functional fragment, domain, or feature thereof.

30. A method for producing a polypeptide of claim 29, comprising the steps of:
(a) growing cells comprising an expression cassette under suitable growth conditions, the expression cassette comprising a nucleic acid molecule of claim 28; and
(b) isolating the polypeptide from the cells.

31. A transgenic plant cell comprising an isolated nucleic acid molecule of claim 1.

32. The transgenic plant of claim 31, wherein the plant is selected from the group consisting of corn (Zea mays), Brassica sp., alfalfa (Medicago sativa), rice (Oryza sativa ssp.), rye (Secale cereale), sorghum (Sorghum bicolor, Sorghum vulgare), pearl millet (Pennisetum glaucum), proso millet (Panicum miliaceum), foxtail millet (Setaria italica), finger millet (Eleusine coracana), sunflower (Helianthus annuus), safflower (Carthamus tinctorius), wheat (Triticum aestivum), soybean (Glycine max), tobacco (Nicotiana tabacum), potato (Solanum tuberosum), peanut (Arachis hypogaea), cotton, sweet potato (Ipomoea batatus), cassaya (Manihot esculenta), coffee (Cofea spp.), coconut (Cocos nucifera), pineapple (Ananas comosus), citrus trees (Citrus spp.), cocoa (Theobroma cacao), tea (Camellia sinensis), banana (Musa spp.), avocado (Persea ultilane), fig (Ficus casica), guava (Psidium guajava), mango (Mangifera indica), olive (Olea europaea), papaya (Carica papaya), cashew (Anacardium occidentale), macadamia (Macadamia integrifolia), almond (Prunus amygdalus), sugar beets (Beta vulgaris), sugarcane (Saccharum spp.), oats, duckweed (Lemna), barley, a vegetable, an ornamental, and a conifer.

33. The transgenic plant of claim 32, wherein the plant is rice (Oryza sativa ssp.)

34. The transgenic plant of claim 32, wherein the duckweed is selected from the group consisting of genus Lemna, genus Spirodela, genus Woffia, and genus Wofiella.

35. The transgenic plant of claim 32, wherein the vegetable is selected from the group consisting of tomatoes, lettuce, guar, locust bean, fenugreek, soybean, garden beans, cowpea, mungbean, lima bean, fava bean, lentils, chickpea, green bean, lima bean, pea, and members of the genus Cucumis.

36. The transgenic plant of claim 32, wherein the ornamental is selected from the group consisting of impatiens, Begonia, Pelargonium, Viola, Cyclamen, Verbena, Vinca, Tagetes, Primula, Saint Paulia, Agertum, Amaranthus, Antihirrhinum, Aquilegia, Cineraria, Clover, Cosmo, Cowpea, Dahlia, Datura, Delphinium, Gerbera, Gladiolus, Gloxinia, Hippeastrum, Mesembryanthemum, Salpiglossos, and Zinnia, azalea, hydrangea, hibiscus, rose, tulip, daffodil, petunia, carnation, poinsettia, and chrysanthemum.

37. The transgenic plant of claim 32, wherein the conifer is selected from the group consisting of loblolly pine, slash pine, ponderosa pine, lodgepole pine, Monterey pine, Douglas-fir, Western hemlock, Sitka spruce, redwood, silver fir, balsam fir, Western red cedar, and Alaska yellow-cedar.

38. The transgenic plant of claim 31, wherein the transgenic plant is a plant selected from the group consisting of Acacia, aneth, artichoke, arugula, blackberry, canola, cilantro, clementines, escarole, eucalyptus, fennel, grapefruit, honey dew, jicama, kiwifruit, lemon, lime, mushroom, nut, okra, orange, parsley, persimmon, plantain, pomegranate, poplar, radiata pine, radicchio, Southern pine, sweetgum, tangerine, triticale, vine, yams, apple, pear, quince, cherry, apricot, melon, hemp, buckwheat, grape, raspberry, chenopodium, blueberry, nectarine, peach, plum, strawberry, watermelon, eggplant, pepper, cauliflower, Brassica, broccoli, cabbage, ultilan sprouts, onion, carrot, leek, beet, broad bean, celery, radish, pumpkin, endive, gourd, garlic, snapbean, spinach, squash, turnip, ultilane, and zucchini.

39. An isolated cell proliferation-related polypeptide, wherein the polypeptide binds in a yeast two hybrid assay to a fragment of a protein selected from the group consisting of OsE2F1 (SEQ ID NO: 194), Os018989-4003 (SEQ ID NO: 2), OsE2F2 (SEQ ID NO: 10), OsS49462 (SEQ ID NO: 206), OsCYCOS2 (SEQ ID NO: 210), OsMADS45 (SEQ ID NO: 202), OsRAP1B (SEQ ID NO: 244), OsMADS6 (SEQ ID NO: 236), OsFDRMADS8 (SEQ ID NO: 228), OsMADS3 (SEQ ID NO: 232), OsMADS5 (SEQ ID NO: 234), OsMADS15 (SEQ ID NO: 240), OsHOS59 (SEQ ID NO: 258), OsGF14-c (SEQ ID NO: 278), OsDAD1 (SEQ ID NO: 292), Os006819-2510 (SEQ ID NO: 296), OsCRTC (SEQ ID NO: 300), OsSGT1 (SEQ ID NO: 310), OsERP (SEQ ID NO: 312), OsCHIB1 (SEQ ID NO: 318), OsCS (SEQ ID NO: 322), OsPP2A-2 (SEQ ID NO: 330), and OsCAA90866 (SEQ ID NO: 336).

40. The isolated cell proliferation-related polypeptide of claim 39, wherein the isolated proliferation-related polypeptide is selected from the group consisting of:
(a) a polypeptide comprising an amino acid sequence of even numbered SEQ ID NOs: 2-192; and
(b) a polypeptide comprising an amino acid sequence at least 80% similar to the polypeptide of (a) using the GCG Wisconsin Package SEQWEB® application of GAP with the default GAP analysis parameters.

41. The isolated cell proliferation-related polypeptide of claim 40, wherein the polypeptide comprises an amino acid sequence of one of even numbered SEQ ID NOs: 2-192.

42. An expression cassette comprising a nucleic acid molecule encoding a cell proliferation-related polypeptide of claim 1.

43. The expression cassette of claim 42, wherein the nucleic acid molecule encoding a cell proliferation-related polypeptide comprises a nucleic acid sequence selected from odd numbered SEQ ID NOs:1-191.

44. The expression cassette of claim 42, wherein the expression cassette further comprises a regulatory element operatively linked to the nucleic acid molecule.

45. The expression cassette of claim 44, wherein the regulatory element comprises a promoter.

46. The expression cassette of claim 45, wherein the promoter is a plant promoter.

47. The expression cassette of claim 45, wherein the promoter is a constitutive promoter.

48. The expression cassette of claim 45, wherein the promoter is a tissue-specific or a cell type-specific promoter.

49. The expression cassette of claim 48, wherein the tissue-specific or cell type-specific promoter directs expression of the expression cassette in a location selected from the group consisting of epidermis, root, vascular tissue, meristem, cambium, cortex, pith, leaf, flower, seed, and combinations thereof.

50. A transgenic plant cell comprising the expression cassette of claim 42.

51. The transgenic plant cell of claim 50, wherein the isolated nucleic acid molecule comprises a nucleic acid sequence of one of odd numbered SEQ ID NOs:1-191.

52. A transgenic plant comprising the expression cassette of claim 42.

53. Transgenic seeds or progeny of the trangenic plant of claim 52.

54. A method for modulating proliferation of a plant cell comprising introducing into the plant cell an expression cassette comprising an isolated nucleic acid molecule encoding a cell proliferation-related polypeptide, wherein the polypeptide binds in a yeast two hybrid assay to a fragment of a protein selected from the group consisting of OsE2F1 (SEQ ID NO: 194), Os018989-4003 (SEQ ID NO: 2), OsE2F2 (SEQ ID NO: 10), OsS49462 (SEQ ID NO: 206), OsCYCOS2 (SEQ ID NO: 210), OsMADS45 (SEQ ID NO: 202), OsRAP1B (SEQ ID NO: 244), OsMADS6 (SEQ ID NO: 236), OsFDRMADS8 (SEQ ID NO: 228), OsMADS3 (SEQ ID NO: 232), OsMADS5 (SEQ ID NO: 234), OsMADS15 (SEQ ID NO: 240), OsHOS59 (SEQ ID NO: 258), OsGF14-c (SEQ ID NO: 278), OsDAD1 (SEQ ID NO: 292), Os006819-2510 (SEQ ID NO: 296), OsCRTC (SEQ ID NO: 300), OsSGT1 (SEQ ID NO: 31-0), OsERP (SEQ ID NO: 312), OsCHIB1 (SEQ ID NO: 318), OsCS (SEQ ID NO: 322), OsPP2A-2 (SEQ ID NO: 330), and OsCAA90866 (SEQ ID NO: 336).

55. The method of claim 54, wherein expression of the polypeptide in the cell results in an enhancement of a rate or extent of proliferation of the cell.

56. The method of claim 54, wherein expression of the polypeptide in the cell results in a decrease in a rate or extent of proliferation of the cell.

57. The method of claim 54, wherein the isolated nucleic acid molecule comprises a nucleic acid sequence selected from one of odd numbered SEQ ID NOs: 1-339.

58. The method of claim 57, wherein the isolated nucleic acid molecule comprises a nucleic acid sequence selected from one of odd numbered SEQ ID NOs:1-191.

The application's sequence listing, which the Patent Office published only in electronic form, follows.

SEQUENCE LISTING (349 sequences)

SEQ ID NO: 1 - DNA, 885 bp, Oryza sativa
  CDS (1)..(885)
atggcgcctccctgcggcgatgccgcggcggctgcctccgccgcgcccggcctggccaacctgctcattcgcgaaggcgccggcctcccttcgcgtcccgaacggtacccgccattccggccctgtacttctgattcctttgctccaatctctagggaaggggacgatattcccccccaaaaaaaatcggtttctttacgcagcggcggcggcggcaatgcggcagagagggaggagggcggtgcgaacaggaacgggaagaaggagaagaccggggcgcagaggatcaccgggtgggggctccgtgagttcagcaagatagtttctaagaaagttgaggccaaaggaagaaccacatataatgaggttgccgatgagatttttgcggagctgaagtccattacgcagaacggtctggagtttgatgagaagaatattaggcggagggtatatgatgctttcaatgtgctcattgcaattcgtgttattgcaaaagataaaaaggagataaagtggatgggccttactaattatagatacgaaaagatacagaagttggaggaagttcacaaagaactcatcaccaggatcaagaataagaagaagcttctccaggaaattgaaaagcagtttgatgaccttcagaatattacattacgcaaccaggctagtcagaggccagcagaaagtgttaatggcatcctccttccgttcttattgatcaagacatcccgaaaagcaagggtggaaattgagatttcggaagattcgaagtttgcacggttcgacttcaacggtgcaccattcaccatgcatgatgatgtatcaatccttgaagccatcaggcgtaacaaaggaagagctggcctctccattcacccttaa

SEQ ID NO: 2 - protein, 294 aa, Oryza sativa
MAPPCGDAAAAASAAPGLANLLIREGAGLPSRPERYPPFRPCTSDSFAPISREGDDIPPQKKSVSLRSGGGGNAAEREEGGANRNGKKEKTGAQRITGWGLREFSKIVSKKVEAKGRTTYNEVADEIFAELKSITQNGLEFDEKNIRRRVYDAFNVLIAIRVIAKDKKEIKWMGLTNYRYEKIQKLEEVHKELITRIKNKKKLLQEIEKQFDDLQNITLRNQASQRPAESVNGILLPFLLIKTSRKARVEIEISEDSKFARFDFNGAPFTMHDDVSILEAIRRNKGRAGLSIHP

SEQ ID NO: 3 - DNA, 1041 bp, Oryza sativa
  CDS (1)..(1041)
atggtctccggcgcggcgcattcggcctccaccagtggcggcggcggggggagcgagggctcccccaccggccgcgccgcgccgggcatgcagggcggcggcagcgccgccacgcccgccgcctcggcctccgcgtccacgccggccagcgagaccaccgtcgcccgccgcctcgacggcctcgacatccagggcgacgacgcgccctcgtcgcagcccgccacgagcaagaagaaaaaaagggggcctggaacacgtgcaacgggccctgacaagggtggccgtggattgcgccaatttagtatgaaagtttgtgagaaagttgaaagcaaagggagaacaacctacaacgaggtggcagatgagcttgtagctgagtttgcagaccccaacaataattttgcatcacctgatcctgacaaccctaacacaccacaatttgatgagaaaaatatacgacgaagggtttatgatgcattgaatgtcctgatggctatggatattatatctaaggataaaaaggaaattcagtggaagggcttgcctcggacaagtatgagcgatgttgaagaattgaagacagagatcatcggactgaaaggtaggatcgacaagaaaaatgcatatttgcaggagttagaagatcaatttgtaggtcttcaaaacttggcacagcgaaacgagcagctttatggttcaggaaatgctccttcaggaggagtggcattgccatttatattggtgcagacacgtcctcatgctacagtagaagtggagatatcagaagatatgcagctggtgcattttgatttcaatagcactccatttgaactgcatgacgattcctttgtactgaaagcattggggttctctggcaaagaaccagatgatacgcaagcctgggttggaaatggaggtgagtgctcaaccacacctatctatcatcaatcaccccaagttgcgaggccaaacggagttagactaccaacatcgccccctattcccggtatacttaaagggcgtgtcaagcatgaacattag

SEQ ID NO: 4 - protein, 346 aa, Oryza sativa
MVSGAAHSASTSGGGGGSEGSPTGRAAPGMQGGGSAATPAASASASTPASETTVARRLDGLDIQGDDAPSSQPATSKKKKRGPGTRATGPDKGGRGLRQFSMKVCEKVESKGRTTYNEVADELVAEFADPNNNFASPDPDNPNTPQFDEKNIRRRVYDALNVLMAMDIISKDKKEIQWKGLPRTSMSDVEELKTEIIGLKGRIDKKNAYLQELEDQFVGLQNLAQRNEQLYGSGNAPSGGVALPFILVQTRPHATVEVEISEDMQLVHFDFNSTPFELHDDSFVLKALGFSGKEPDDTQAWVGNGGECSTTPIYHQSPQVARPNGVRLPTSPPIPGILKGRVKHEH

SEQ ID NO: 5 - DNA, 1843 bp, Oryza sativa
  CDS (1)..(1842)
  misc_feature (234)..(234): Xaa at amino acid position 234 stands for Gln, or His.
  misc_feature (702)..(702): n is a, c, g, or t
accatggggacggcctgcaaggagggctcacacattgggattatcccgcgtgccatggccacgctgttcgacaagatcgacaagctcaagaaccaagtagagttccagctgcgcgtttcgtttattgagattctgaaagaagaggtgagggatttgcttgatcctgctactgctgctgttggcaaacttgagaatggaaatggacatgcaaccaagttgtcggttccaggtaaaccccctgttcagatccgggaggcgtcgaacggggtcataacgttagcaggatcgaccgaagtgcatgtcactacccagaaagaaatgacggcatgccttgagcaaggatctctgagtcgtgcaactggaagtaccaacatgaacaaccaatcaagtcgttcccatgccatcttcacaatcacattggagcagatgcgcaaagcagatcccatcatgactttagatggaatgcctattgaagagatgaatgaagactatctctgtgccaaactccacttagtagatcttgctggatcagaacgtgctaaaagaactggttctgatggccttcggtttaaggaaggtgttcatatcaacagaggacttcttgctcttggcaatgtcatcagtgctctcggtgatgagaaaaagaggaaagaaggcgctcatgttccttaccgggacagcaaactcactcgccttctgcangactctccaggtggaaacagcaagactgtaatgatagcctgtattagtccagcagatatcaatgctgaagaaacactgaacactttgaaatatgctaaccgcgctcgtaacatccagaataagccaattgtaaatagaaatcctgttgctgatgagatgaaaaggatgcgccagcaaattgaatacttgcaagcagaactcgtttcagctcgaggaggagttgtcttagatgatgttcagggtctcagggaaaggatctcaatgcttgaacagaaaaatgaagacctttgcagggaactgtatgaccttcgcaaccatggttacactgatccttgtgaacctgaactgcaaaaaattggaactggttacactaaaggtgaagggctcaaaagaagcttgcaaagtacagaaccatttgatgtccccatgactgactcagtaagagcaggcagccctaaagatattgatgatgaagtggccaaagaatgggaacacacaatgctgcaggatagcatgggcaaagagttgaatgaattaaacagacaactggagcaaaaggagtctgagatgaaaatgtatggatctgacactgttgcacttaaacaacactttggaaagaaacttttggagcttgaagaagagaaaagagctgtacagcagcaagaaagggacagattgttagctgaagttgaaagtctaaatgctgatggacaaacacacaagttgcgagatgcccagctgcaaaaattaaaaacccttgaagcacagcagattctagacctcaagaaaaagcaggagaaccaagttcaacttctgaaggaaaagcaaaagagtgatgaagctgctaagaagttgcaggaagaaattcattctataaaggcacagaaggttgttcaactacaacataaaatcaaacaagaagcggaacaattccggcaatggaaggctacccgtgaaaaggaactcctgcagcagttgaggaaagaggggcggcgaaatgagtatgaacgccacaaacttcaagcacttaatcagcggcagaagttggttttgcagaggaagactgaagaagctgcgatggctaccaaaaggctgaaagagttactagaggctcggaaatcatcaggacgtgacaactcag

SEQ ID NO: 6 - protein, 614 aa, Oryza sativa
  misc_feature (234)..(234): The 'Xaa' at location 234 stands for Gln, or His.
TMGTACKEGSHIGIIPRAMATLFDKIDKLKNQVEFQLRVSFIEILKEEVRDLLDPATAAVGKLENGNGHATKLSVPGKPPVQIREASNGVITLAGSTEVHVTTQKEMTACLEQGSLSRATGSTNMNNQSSRSHAIFTITLEQMRKADPIMTLDGMPIEEMNEDYLCAKLHLVDLAGSERAKRTGSDGLRFKEGVHINRGLLALGNVISALGDEKKRKEGAHVPYRDSKLTRLLXDSPGGNSKTVMIACISPADINAEETLNTLKYANRARNIQNKPIVNRNPVADEMKRMRQQIEYLQAELVSARGGVVLDDVQGLRERISMLEQKNEDLCRELYDLRNHGYTDPCEPELQKIGTGYTKGEGLKRSLQSTEPFDVPMTDSVRAGSPKDIDDEVAKEWEHTMLQDSMGKELNELNRQLEQKESEMKMYGSDTVALKQHFGKKLLELEEEKRAVQQQERDRLLAEVESLNADGQTHKLRDAQLQKLKTLEAQQILDLKKKQENQVQLLKEKQKSDEAAKKLQEEIHSIKAQKVVQLQHKIKQEAEQFRQWKATREKELLQQLRKEGRRNEYERHKLQALNQRQKLVLQRKTEEAAMATKRLKELLEARKSSGRDNS

SEQ ID NO: 7 - DNA, 261 bp, Oryza sativa
  CDS (1)..(261)
atggctcgcgcgggcgggcatgggatggggaacccggtgaacgtggggatcgcggtgcaggcggactgggagaaccgcgagttcatctccaacatctccctcaacgtccgtcgcctcttcgacttcctcctccgattcgaagctactacgaagagcaaacttgcgtccttgaatgagaagctggacatcctagagcggaaactggaggtgcttgaggttcaagtgagcagcgcaacaaccaatccatccgttttcaactag

SEQ ID NO: 8 - protein, 86 aa, Oryza sativa
MARAGGHGMGNPVNVGIAVQADWENREFISNISLNVRRLFDFLLRFEATTKSKLASLNEKLDILERKLEVLEVQVSSATTNPSVFN

SEQ ID NO: 9 - DNA, 1104 bp, Oryza sativa
  CDS (1)..(1104)
atgacggaggccgtgctcatccggacgccattaaagcggaaacatgacagagaagagaatgaagctgctgaatcaaatgactggatgatgagccctggatacactaatccagcaggcagcccagttccaacaccgctttcaggaaaaggttcaaaagcttttgccaaatcaaaagctgcaaaaggccagaaatcttgtccccagacccctttgtgcgctagttctccaggcaatccggttacacctgttggtggctgccgatatgatagctccctagggctattgacaaaaaagttcctaaacttgctaaagggtgcacctggcggcatagttgatttgaataatgccgcagaaacactggaggtacaaaaaaggcgtatatatgacatcactaatgtccttgaagggatagggctgatagaaaagaagctcaagaacaatatccgttggaaaggaattgatgactcccgaccaggagaagttagtgatgatatgtccatcttacaggctgatattgaagccctctcactgcaggagcacagcgtagatcaacaaataagtgaaatgcgagataagttaagaggactcacagaagatgaaaataaccaaaagtggctatatgttactgaagatgacatcaagtctttgccctgcttccagaatcagacactgatcgcaatcaaagcgcctcatggtacaactttggaggtcccagatcctgatgaagtgaatgattatccacagaggagatataggattgttctaaggagtactatgggtccaatagatgtctacctagttagtcaatttgaggagatgagtggcatggagactcctccaaggactgtgcagccagtaagcatggattctctagagaatcccaggacgccattggctgcagaacccaacaaagctgcagagtcacagccaaatattcaagatgggctgctaatgccttctgatgctccttctagttcacaggatattggcgggatgatgaagattgtcccttcagaacttgataccgatgcagactactggctcttatcagatgccggggttagcattaccgacatgtggaagacagcaccagaggtggagtga

SEQ ID NO: 10 - protein, 367 aa, Oryza sativa
MTEAVLIRTPLKRKHDREENEAAESNDWMMSPGYTNPAGSPVPTPLSGKGSKAFAKSKAAKGQKSCPQTPLCASSPGNPVTPVGGCRYDSSLGLLTKKFLNLLKGAPGGIVDLNNAAETLEVQKRRIYDITNVLEGIGLIEKKLKNNIRWKGIDDSRPGEVSDDMSILQADIEALSLQEHSVDQQISEMRDKLRGLTEDENNQKWLYVTEDDIKSLPCFQNQTLIAIKAPHGTTLEVPDPDEVNDYPQRRYRIVLRSTMGPIDVYLVSQFEEMSGMETPPRTVQPVSMDSLENPRTPLAAEPNKAAESQPNIQDGLLMPSDAPSSSQDIGGMMKIVPSELDTDADYWLLSDAGVSITDMWKTAPEVE

SEQ ID NO: 11 - DNA, 1503 bp, Oryza sativa
  CDS (1)..(1503)
cccgcgtccggagaccccgtaacgttcggctgggtgtgcggtgcgtggcgtggcgttcccaaggcgttccagctgcgttcaaatttgaaatcaccggtgcggtggcctcgtgggaggcggtgccacgatttattaatacgcaaacaattccgttttcccttgcacgagggctccttttcttttcgccgctacctgcgcagcgccacattcgcctgcattttccatgagccagtcttccccgcgtttgctctcatcgtaggccgcgaccgacggacgcggcgagaggatagagaccaggggcggccgggcggacggacagagcaaccagcgccggctgccggcttagctagctcgcggcggagcatgccgagatccagggggtccgagctgccgcagcgagcgtcgccgcgggcgccgctgcacctcaagacgacggcctgctcggatgcgaatggcgcgcaccaccgtacagtcgtcgaccggagcagccccaagctcgccgaccgccactcgccgcgcagcccgctgcatgagaagaagcgcgcggggacgcgggtggctgagctggagacgaagctgggcaaggtgcaggacgagctcaagaagctgcgggagcagctcgccaccgccgaggccgccaagaaggacgcgcaggtcgcgctcgaggaggctaagaagcgcgttggcaccaaggggagccccgcttccgccgccgcggcgtctccgcgctccccatctccggttgcggtcgaaacccccaagaagactgagcagcagctgaaggtgacggagccgccggccgaggaggagagcagcataaactcccccgcgacggatgtgttcgaggtcgtccggaccgaatcgggggataaggagaaccagagcgcggccggcgccgaggacggcgaggaggtgagctgtggcataaaggccgctttggctgagaaggaactggaggaggaagagacaaagaagatgatcgaagaggagagcattgacgcaacggccattgactccggcgagaaggagaacccggaggtcgcggaactaaaggccaagctgatggcgaaggacatggaggtcgccatactcacggccgacaatgccgagctcaagaagcaggttggtgaagccgcggaggcggccaagaaagctgaggaggaggcggcggccaaggcgtccttggtcgagcaggacctgaaggagagagcggcgcgggaggcccgcatgggcgagcagctgagggcgtcggaagccgctcgggagacgctggaggccgagatgcggcgcctgcgcgtgcagaccgagcaatggcgaaaggccgcggaggcggcccccccggtgattggcggggatgcccacttcgtcggccacaatggcaacggctggggctcccccgcgacgatgccggacgactgcgacgacgaggggttcggtggcaagaggaagggagccggtatccggatgcttggcgacctgtggaagaagaaggggagcaagtga

SEQ ID NO: 12 - protein, 500 aa, Oryza sativa
PASGDPVTFGWVCGAWRGVPKAFQLRSNLKSPVRWPRGRRCHDLLIRKQFRFPLHEGSFSFRRYLRSATFACIFHEPVFPAFALIVGRDRRTRREDRDQGRPGGRTEQPAPAAGLASSRRSMPRSRGSELPQRASPRAPLHLKTTACSDANGAHHRTVVDRSSPKLADRHSPRSPLHEKKRAGTRVAELETKLGKVQDELKKLREQLATAEAAKKDAQVALEEAKKRVGTKGSPASAAAASPRSPSPVAVETPKKTEQQLKVTEPPAEEESSINSPATDVFEVVRTESGDKENQSAAGAEDGEEVSCGIKAALAEKELEEEETKKMIEEESIDATAIDSGEKENPEVAELKAKLMAKDMEVAILTADNAELKKQVGEAAEAAKKAEEEAAAKASLVEQDLKERAAREARMGEQLRASEAARETLEAEMRRLRVQTEQWRKAAEAAPPVIGGDAHFVGHNGNGWGSPATMPDDCDDEGFGGKRKGAGIRMLGDLWKKKGSK

SEQ ID NO: 13 - DNA, 1140 bp, Oryza sativa
  CDS (1)..(1140)
atggtctccggcgtcgcccaccgcccggacgacgacggcgggcgcgccgcctcgacgttccagcgcccgccgcagccggccggcgcgcggccgtccctggccacgccgccgccctcgggcggagcgcaatccgcttcgacgagcggcgggagcgcgggctccccgtccagccgcagcgagcagcatgtccccgcagccgcaggcatggcggcgggggcggcggcggcctctactccgattagtgagaataccttcctccgcctcaacgaccttgacatccacggcgacgatgcgccttcctcacaggctccaacgagcaagaagaagaagagaggagcacgagcagttggtcctgacaaaggtggcagggggctgcgccagtttagtatgaaggtttgtgagaaagttgaaagtaaagggagaacaacatacaacgaggtggcagatgaacttgttgccgaatttgcagatcccaataacagcattttgccaccagatccggataatcccaatgcacaacaatatgacgagaaaaatatacggagaagggtttatgatgctctgaatgttctgatggctatggagattatatctaaagataaaaaggaaattcagtggaaggggttgcctcgaaccagtataaatgatattgaagatttgcagacggaacttgtaggactgaaaagtaggattgagaagaaaaatacatatttgcaggagctgcaagaccaatttgtaggtatgcaaaagttgatacaaagaaatgaacagctatatggttcaggaaacattccctcgggtggagttgcattaccatttatccttgttcagacacggcctcatgcaactgtggaagttgaaatatcagaagatatgcaacttgtacattttgactttaatagcacaccatttgagttgcatgatgactcatttgtactgaaagcaatgagttcttgtggagaagaacaaatcgacggtattcatgatctaatttcaaatggaggtgagagctcaagcatgccaaatatttataggcagcaagtgcagcaacctgcaagatcaactaatggtacagctagattgccaagctcaccccctattccaggaatactgaaagggcgagtgaagcacgagcattag

SEQ ID NO: 14 - protein, 379 aa, Oryza sativa
MVSGVAHRPDDDGGRAASTFQRPPQPAGARPSLATPPPSGGAQSASTSGGSAGSPSSRSEQHVPAAAGMAAGAAAASTPISENTFLRLNDLDIHGDDAPSSQAPTSKKKKRGARAVGPDKGGRGLRQFSMKVCEKVESKGRTTYNEVADELVAEFADPNNSILPPDPDNPNAQQYDEKNIRRRVYDALNVLMAMEIISKDKKEIQWKGLPRTSINDIEDLQTELVGLKSRIEKKNTYLQELQDQFVGMQKLIQRNEQLYGSGNIPSGGVALPFILVQTRPHATVEVEISEDMQLVHFDFNSTPFELHDDSFVLKAMSSCGEEQIDGIHDLISNGGESSSMPNIYRQQVQQPARSTNGTARLPSSPPIPGILKGRVKHEH

SEQ ID NO: 15 - DNA, 1071 bp, Oryza sativa
  CDS (1)..(1071)
atggatccaatcggcgacccatcgccgtcgtcccggcggtcggtgaagcggcggcctcccgcgcgatcgccggagctgtcgccgaaggcgtggggaggggaggcgccggagctgatccggcggctggaggagctggaggaggcggcggcgcggctgcggggcgaaaaggaggccgcggaggaggcggcgcgggagctgcaggccgagttggatgcggagcgggcgtcggcggaaacggcgaccagcgaggccatgctcatgatcgagcggctgcagcgggagaaggcggccgcgcagatggaggcccgccagttccggcggtacgccgagggccgcgaggatcgcgagcgtgaggtacaggaagagctcgcctcgctctccgacctcgccgcctcctaccactcccgcctccagtcccacgggatcgaccctgattccttctccgacgacggcgaggaggagcagcacgacgaggaagatggcgaagaggtagaacagatcgacacggccgcgctacagacagatggaagcagcggcggcgactcaatcggtggcatgcaggtgaaagccatggtcgacgatgatgaggaagagcaattcacccctgtggagaaggagttcgagtacacggtggatgtgaggtgcgcgagctcgacgacgaaggtatccggggcggtggttgttggggagttcatgggggagggcaatgcagctgcagggggattgtacgccagggtggaggctctggaggcggacagggcggcaatgcggagggaaatcgcagcattgcgagcagagagagctcagctggtgatggcgagggcgatggcgcggcggctgtgccgggaggtggttgctgaacagaaagccaagaaagtggctgcctcaccacgaagcttctcggtgctaggggtttgcaagtgggtgctctcgataatcttttggagaaacagaagttccacagccaggtataccttcggtctgtcaactacgttccttggcttcctactgctgctcgacagatccaccatgttgagtccctggcgtcgtctgcctagcccacggcaatga

SEQ ID NO: 16 - protein, 356 aa, Oryza sativa
MDPIGDPSPSSRRSVKRRPPARSPELSPKAWGGEAPELIRRLEELEEAAARLRGEKEAAEEAARELQAELDAERASAETATSEAMLMIERLQREKAAAQMEARQFRRYAEGREDREREVQEELASLSDLAASYHSRLQSHGIDPDSFSDDGEEEQHDEEDGEEVEQIDTAALQTDGSSGGDSIGGMQVKAMVDDDEEEQFTPVEKEFEYTVDVRCASSTTKVSGAVVVGEFMGEGNAAAGGLYARVEALEADRAAMRREIAALRAERAQLVMARAMARRLCREVVAEQKAKKVAASPRSFSVLGVCKWVLSIIFWRNRSSTARYTFGLSTTFLGFLLLLDRSTMLSPWRRLPSPRQ

SEQ ID NO: 17 - DNA, 552 bp, Oryza sativa
  CDS (1)..(552)
gagcatgaatcagatgaagagaagaatgaagttgatactagcaatgaaatcaaagagattgtcattgatgacatggagccaaaagtgttccaggctgggtttctttttatgtacagggacaatcttgttggtgatgatgagttgtctgcatcaagctcggactgctctatctttgatactttagctgggaaattattggctgctgctgacagatatgagttgccaagactacggttattgtgtgaatcttacttgtgcaagcatatttctgtaaactctgtggcaactaccctagcattggctgaccgacatcatgctatggagcttaaatctgtttgcctaaaatttgctgctgaaaatctttcagctgtaatccggaccgacgggtttgattacctcaaagacaactgccccgcgctgcaatcggagatactgaggacggtcgccgggtgtgaggaggaatgcagcagcggagggaagagccagagcgtgtgggggcagctctcggatggcggcgataccagcgggcgcagggtgaggccaagggtctga

SEQ ID NO: 18 - protein, 183 aa, Oryza sativa
EHESDEEKNEVDTSNEIKEIVIDDMEPKVFQAGFLFMYRDNLVGDDELSASSSDCSIFDTLAGKLLAAADRYELPRLRLLCESYLCKHISVNSVATTLALADRHHAMELKSVCLKFAAENLSAVIRTDGFDYLKDNCPALQSEILRTVAGCEEECSSGGKSQSVWGQLSDGGDTSGRRVRPRV

SEQ ID NO: 19 - DNA, 984 bp, Oryza sativa
  CDS (1)..(984)
atggcgaagtcgagcgcggacgacgccgagctgcggcgcgcgtgcgcgcaggccgtggcggcttcgggggcgcgcggcgaggaggtgtccttctccatccgcgtcgccaaggggaggggcatcttcgagaagctcggccgcctcgccaagccccgcgtcctcgcgctcaccgttaaacaatcgacaaaaggtgaggcagccaaagcttttctccgagtattgaagtattcatccggcgcagtacttgagccagccaagctttacaagttgaaacatctcacaaaggttgaggttatttcgaatgatcctagtggttgcacgtttgtattggggtttgataaccttagaagtcagagtgttgcccctccacaatggacaatgcgcaacattgatgacagaaaccgcctacttttttctatcctgaccatgtgcaaagagatacttagctatcttccaaaagtcgttggaattgattttgtggagctagccctctgggccaaggaaaatacagtgactctggacaaccaatcgagcacccaagatggacaagaaaaatctgtcacaactcaaactgagaggaaagtaactgtaactgttgaaaatgatcttgggtcccaagcaaaggatgaagaggaagacatggaggcacttcttgacacatatgtcatgggcataggtgaagcagatgctttctctgagagattgaaacaggaacttgttgctttggaagcagccaatgtctatcaactactgcagagtgaacctttaatagatgaggttttgcagggtctggatgctgctagtgcaaccgtagatgatatggatgagtggttacgcatttttaatatgaagctcaggcatatgagagaagatattgcatcgattgaatcacgcaacaatggcttggagatgcagtccgtaaataacaaaggactcgttgaagaactagaaaagttgcttgatcgcttgcgaattccacaggag

SEQ ID NO: 20 - protein, 328 aa, Oryza sativa
MAKSSADDAELRRACAQAVAASGARGEEVSFSIRVAKGRGIFEKLGRLAKPRVLALTVKQSTKGEAAKAFLRVLKYSSGAVLEPAKLYKLKHLTKVEVISNDPSGCTFVLGFDNLRSQSVAPPQWTMRNIDDRNRLLFSILTMCKEILSYLPKVVGIDFVELALWAKENTVTLDNQSSTQDGQEKSVTTQTERKVTVTVENDLGSQAKDEEEDMEALLDTYVMGIGEADAFSERLKQELVALEAANVYQLLQSEPLIDEVLQGLDAASATVDDMDEWLRIFNMKLRHMREDIASIESRNNGLEMQSVNNKGLVEELEKLLDRLRIPQE

SEQ ID NO: 21 - DNA, 1428 bp, Oryza sativa
  CDS (1)..(1428)
ccacgcgtccggccttggaactttgagcttttcaagatgccaaggaggacagataatgctgcttctgccaattcagttgaaccagaaaaatcagaagaatgtttggagtttgatgatgatgaggaggaggaggtagaagaggaggaaattgaatatgaagaaattgaggaggagatagaagaggaggaggtagaggaggatgaagatgtcgtggaggaagttgaggaggtagatgaggaggaagatgaggaggaagaagaggaatctgatgaaactgaaggtgtaagtaaaactaaaggtgttcaccagaaggatgttactgaaaagggaaagcatgctgagcttcttgctcttcctccccatggttctgaagtatatgttggaggcatctccagtgatgtatcttctgaagatctgaagagactatgtgaaccagttggagaagttgtggaagtgagaatgatgagaggaaaggacgatagcaggggatatgcttttgttaattttagaacaaaaggtttggcattaaaggctgtcaaagaattgaacaatgcaaaactgaagggaaagcggataagggtttcttcctcgcaggctaagaacaagctttttattggaaatgtaccccatagttggacagatgatgatttcagaaaggttgtggaggaagttggtccaggagtattaaaagctgatctcatgaaggtctcaagtgcaaatcgcaatcggggttatggttttgttgaatactacaaccatgcatgtgcagagtatgcaaggcaggagatgtcttccccaacattcaaactagattcaaatgctcctacagtcagctgggcagatcctaagaataacgactcggcctctacttctcaggttaaatctgtatatgtgaaaaatctgcccaagaatgttactcaagcacagctgaaaaggctatttgagcaccatggtgaaattgaaaaggttgttcttcctccttcaagaggaggtcatgataataggtatggttttgttcactttaaggacagatccatggccatgagggctctgcagaacacagagagatatgagcttgatggtcaggtcctggattgctcacttgcgaaacctcctgctgctgataagaaggatgatagagtaccactacctagttcaaatggagctccattgctcccgagttatcctccacttggatatggtatcatgtcagtaccaggtgcctatggtgctgctcctgctagtactgcacagcctatgctgtatgctccaagagctcctccaggtgcagcaatggttccaatgatgttaccggatggtcgtctcgtatatgttgtacaacagcctggtggacagttgccgctggcttcgccgccgccgcagcaagctggacatcgtagcggcagtggaggacgtcatggcggcagt

SEQ ID NO: 22 - protein, 476 aa, Oryza sativa
PRVRPWNFELFKMPRRTDNAASANSVEPEKSEECLEFDDDEEEEVEEEEIEYEEIEEEIEEEEVEEDEDVVEEVEEVDEEEDEEEEEESDETEGVSKTKGVHQKDVTEKGKHAELLALPPHGSEVYVGGISSDVSSEDLKRLCEPVGEVVEVRMMRGKDDSRGYAFVNFRTKGLALKAVKELNNAKLKGKRIRVSSSQAKNKLFIGNVPHSWTDDDFRKVVEEVGPGVLKADLMKVSSANRNRGYGFVEYYNHACAEYARQEMSSPTFKLDSNAPTVSWADPKNNDSASTSQVKSVYVKNLPKNVTQAQLKRLFEHHGEIEKVVLPPSRGGHDNRYGFVHFKDRSMAMRALQNTERYELDGQVLDCSLAKPPAADKKDDRVPLPSSNGAPLLPSYPPLGYGIMSVPGAYGAAPASTAQPMLYAPRAPPGAAMVPMMLPDGRLVYVVQQPGGQLPLASPPPQQAGHRSGSGGRHGGS

SEQ ID NO: 23 - DNA, 687 bp, Oryza sativa
  CDS (1)..(687)
gttcttcttgattctttgaaacggaagacatatgatgatgagctaaggagggaggagcttttgaactacttcagacggtttcagagtgcttctcaaaagaaaggaggaagtggtatttttcgacaagggtttagcccttctgaaggtgttgatgaaggaccttatggtttatcaagaagaatagcctgcaagaaatgtggtgacttccacctgtggatttatacaggaagagctaaatcgcaagctagatggtgtcaggactgcaatgattttcaccaagctaaagatggggatggatgggttgagcagtcttttcaaccagttctatttgggttgctgcacaagcctgaattgcctcatgcatatgtttgtgctgaaagcatcattttcgatgtcaccgagtggttcacctgtcagggaatgagatgccccgcgaacactcacaagccgagcttccatgtcaatgccagcttgttaaagcagaatagtggcaaggggagcacctcggcgcagaggggtggagggatccctaatggtgtaaacatggatggcggaatcgatgaagaggagttcttcgagtggttgcagaatgcactgcagtctggcatgtttgaatcgtttggcgcgcaaaacgagcccccttcccctggaagtggaagcaatgccaagggtagtaatagcagtagt

SEQ ID NO: 24 - protein, 229 aa, Oryza sativa
VLLDSLKRKTYDDELRREELLNYFRRFQSASQKKGGSGIFRQGFSPSEGVDEGPYGLSRRIACKKCGDFHLWIYTGRAKSQARWCQDCNDFHQAKDGDGWVEQSFQPVLFGLLHKPELPHAYVCAESIIFDVTEWFTCQGMRCPANTHKPSFHVNASLLKQNSGKGSTSAQRGGGIPNGVNMDGGIDEEEFFEWLQNALQSGMFESFGAQNEPPSPGSGSNAKGSNSSS

SEQ ID NO: 25 - DNA, 476 bp, Oryza sativa
  CDS (1)..(474)
tcgtcctccgaccaggctgcagaatttactgatatggaaggcgaatcatcagcagttacttcaccatttcctgctctgacttcaaccacaccaaatgaattggagatgactaacaagaattccaatgtggtaggcggaatgactcacagcaacagtatgcccacattgactgctgcaaaagatggaaataccaaagttttacccttcgaattccgagcacttgaagtgtgccttgagtcagcctgtagaagcctagaagaggaaacgtcgactctggagcaagaggcgtatccggcacttgatgagctgacttcaaagataagcacactaaatcttgagcgagttaggcaaattaagagccgcctggttgcaatctctggtcgtgtgcagaaggtgagggatgaacttgagcatttgttggatgatgaaatggacatggctgaaatgtatttgacagaaaagcttactcgacaaga

SEQ ID NO: 26 - protein, 158 aa, Oryza sativa
SSSDQAAEFTDMEGESSAVTSPFPALTSTTPNELEMTNKNSNVVGGMTHSNSMPTLTAAKDGNTKVLPFEFRALEVCLESACRSLEEETSTLEQEAYPALDELTSKISTLNLERVRQIKSRLVAISGRVQKVRDELEHLLDDEMDMAEMYLTEKLTRQ

SEQ ID NO: 27 - DNA, 1488 bp, Oryza sativa
  CDS (1)..(1488)
atggataaagaactaaaagaaagagatgaaaaatatgttgagctggataccaagttccagaggcttcacaagcgtgctaaacaacgcatacaggatatacagaaggaaaaagatgacatggaagctcgctttaatgaaattaaccagaaggctgagcaggcttcttctctgcagtcagcagcacaacaggaactggaacgtgctcgtcagcaggctagtgaggctttacggtcaatggatgctgaaaggcagcaattgcgaacggtgaacagcaagttaagaactaatcttgatgaggcacgtgttgccttggaggccaggaataatgtccttgagaagttgcgacaatcgatgtttgaaaaagaacagttgttagagcaaacccaagcatcacttcaatctgcagaagaaaagagaaatgcatcaattgcggagcttactgctaagcatcagaagcaattagaaagcttggaggcacagctaactgaggtttctgcggagaggacaaaagcatctgaaacgatccaatctcttcagatgttgcttgtggagaaagattcagaaatagctgaaattgaagcagcttctactggggaagctgctcgaattagagctgccatggaggagcttaaaggcgagcttgctcatctgaaggaccaacatgaaaaagaaaggcaaaattgggaaactacttgtgaatcgcttaggacaaaattggaagcatcagaaagtgcatgccatatatctgtgatagaatctactaaagttaaaagtcaactggagttggagttatcaaagcaaaaccaattactacaaaccaaagactctgatctattggctgcaaaagacgagattagtcggctggaaagcgagttttctgcatataaggtccgcgcacatgcacttctgcaaaagaaggatgctgagctgaacacagctaaaaactcagatttgattaaagcacatgaagaagcaataagggaagctgaaaaggaaatttcagctgccttggcagaaagagataaagccatccatgaccttcaaattgctcaatccaaatatggtgaagagattgaagcaagggatttggctctcgctgattctgacaaaaagttaaagaatgtcatggcaaaattggattctcttacttctaaattcctttccaaaaaagaatcatgggagaaaaacgtggcaagtgtagaggaaagctggagattgaaatgtgagtctgtgaaggctgagagcaatgggcatgctggagatgaacttaagaagaatttagtggagttgacagtaaaacatgagaaactaaaggaagagcatgattctttccgtgatattgctgatagaatgcttgaagagaaggaccgggaggtggctaagctcctcagggaaaacaaggatctacataactctttagaggctaaagcggcagttagcatcaatggtaatcaaaatccaggacctgctaaacaggatcggacgcgt

SEQ ID NO: 28 - protein, 496 aa, Oryza sativa
MDKELKERDEKYVELDTKFQRLHKRAKQRIQDIQKEKDDMEARFNEINQKAEQASSLQSAAQQELERARQQASEALRSMDAERQQLRTVNSKLRTNLDEARVALEARNNVLEKLRQSMFEKEQLLEQTQASLQSAEEKRNASIAELTAKHQKQLESLEAQLTEVSAERTKASETIQSLQMLLVEKDSEIAEIEAASTGEAARIRAAMEELKGELAHLKDQHEKERQNWETTCESLRTKLEASESACHISVIESTKVKSQLELELSKQNQLLQTKDSDLLAAKDEISRLESEFSAYKVRAHALLQKKDAELNTAKNSDLIKAHEEAIREAEKEISAALAERDKAIHDLQIAQSKYGEEIEARDLALADSDKKLKNVMAKLDSLTSKFLSKKESWEKNVASVEESWRLKCESVKAESNGHAGDELKKNLVELTVKHEKLKEEHDSFRDIADRMLEEKDREVAKLLRENKDLHNSLEAKAAVSINGNQNPGPAKQDRTR

SEQ ID NO: 29 - DNA, 2043 bp, Oryza sativa
  CDS (1)..(2043)
atggctggtaatccggcggcggcggcgccgtcgtcgtctggctcttcgtcggtgttcctgccgcccccgtcgccgtccgacggggagctgctccggccgctgcaccgcctggcgcgcgacctgtccgccgtcgacacgcccgcgccgttcctgcgcgccgcgttcgcgtccatctcgaggcggtccaagctactggcggccgcgttcgacgacctgctgctgtgcggcgccgcgggggagctgccgcggtcggcgtcgctgtgcctgcgggaggtgctcctggtgctgcagcggttcaaggcgatcgtcgccgattgctcggcgcgcagccggatgcggctgctgctggagtccgacgagatggaggcggagctgcgggagctcaaccacgacctggccacgctgctcgacctgttgccggtcgtcgagctggggcttgccgacgacgtgctcgacgtcctcgccctcgcgtcgcgccagtgccggcggtgctcgccggcaccggagtcggaggaggcgctgaaggcgagcgtgctgtcgctgatacaagagatcgagcgggagatcgtgccggagcgggagaggctggaggagatcctggtggaggtcggcatcaacgacccggcgagctgcagcgaggagatcgagagcctggagcaggagatcggcgaccgtgcctcggagaaatggacggcctccatgatcgctctcgtcggcctcctccggtatgccaagtgcgtcctgttcagcgccacgcctcggccttcagattccaattccaaggctgacgtcgaggctgaagacggcgagcccccggtgccgccgtcggacttccggtgcccaatctctctcgatctaatgcgcgaccccgtcgtcgtcgcgagcggccagacgtacgatcgcgagtcgatcgaccggtggttcagctccggcaagtcaacgtgccccaagacagggcaggtcttggccaatctggagctcgtgtcgaacaaggccctcaagaacctcatctccaagtggtgccgggagaacggcgtcgccatggaagcctgcgaggcgagcaagagcgagcaggcccaggcggtggccgccaacaaggccgcgctcgaggcggcgcgcatgacggcgtcgttccttgtgaagaagctgtccgtctccttctccccagatgccgccaaccgcgtcgtgcacgagatccggctgctatccaagtccggctcggagaaccgagcgttcgtcggagaggccggagccgtgcctctgctcgtgcccctgctctactccgaggatgcagggctccagctcaacgccgtcacggcgctgcttaatctctccatcctcgaggccaacaagaagcgcatcatgcacgccgacggcgccgtcgaggcggtcgcccatatcatgagctccggcgcgacttggcgcgccaaggagaacgccgccgccgccgtgctcagcttggcgtccgtgcattcctaccgccgcaggctcggcaggaaccaatccgtcgtggagaaattagtgcatctcgtgcgcaccggcccgacgagcacaaagaaggacgcattggccgcgctgctgacgctggccggcgagagggagaacgtcggcaagctcgttgacgcaggcgtcgccgaggtggcgctgtcagcgattagcaaggaggagaccgccgcggcggtgctcgccgcgctggccaagcgcggcggtgcggaggcgatcgtcaacatcgacggcgccgtggcgcgtctcgtggcggaaatgaggcgcggcacggactgggccagggagaacgccacggcggcgctcgtgctgctctgccggcgcctgggcgcgccggcggtgacccaggtcatggccgtgcccggcgtggaatgggcgatctgggagctgatgagcatcggcacggagcgcgcccggcggaaggccgcctcgctcggccggatatgccggcggtgggcagccgcctccgccgccgacggggagcgaggcggcggttgccccgttgccaccgtggtgccccctgccatgatggcttcgtga

SEQ ID NO: 30 - protein, 680 aa, Oryza sativa
MAGNPAAAAPSSSGSSSVFLPPPSPSDGELLRPLHRLARDLSAVDTPAPFLRAAFASISRRSKLLAAAFDDLLLCGAAGELPRSASLCLREVLLVLQRFKAIVADCSARSRMRLLLESDEMEAELRELNHDLATLLDLLPVVELGLADDVLDVLALASRQCRRCSPAPESEEALKASVLSLIQEIEREIVPERERLEEILVEVGINDPASCSEEIESLEQEIGDRASEKWTASMIALVGLLRYAKCVLFSATPRPSDSNSKADVEAEDGEPPVPPSDFRCPISLDLMRDPVVVASGQTYDRESIDRWFSSGKSTCPKTGQVLANLELVSNKALKNLISKWCRENGVAMEACEASKSEQAQAVAANKAALEAARMTASFLVKKLSVSFSPDAANRVVHEIRLLSKSGSENRAFVGEAGAVPLLVPLLYSEDAGLQLNAVTALLNLSILEANKKRIMHADGAVEAVAHIMSSGATWRAKENAAAAVLSLASVHSYRRRLGRNQSVVEKLVHLVRTGPTSTKKDALAALLTLAGERENVGKLVDAGVAEVALSAISKEETAAAVLAALAKRGGAEAIVNIDGAVARLVAEMRRGTDWARENATAALVLLCRRLGAPAVTQVMAVPGVEWAIWELMSIGTERARRKAASLGRICRRWAAASAADGERGGGCPVATVVPPAMMAS

SEQ ID NO: 31 - DNA, 3681 bp, Oryza sativa
  CDS (1)..(3681)
accccgacgactttgtctatgtccatacctccggaacttgctggagcaattccacttattgataggttccaggtagagggctttctgaaggcaatgcaaaaacagatccattcagctggaaaacgtggttttttttcgaagaaatctgtgggaccacatgttcgtgaaaagttcaccttggaagatatgttgtgcttccaaaaggatcctattccaacgtcattgctaaaaataagtagtgaccttgtaagccgttcaattaagttattccatgtcatactgaagtacatgggcatcgattccccagcaataataagtttggatgaaagaattgaacttgttgcaaagctttacaagcatactttgaaacgttctgaactgagagatgagctctttgcacagatttcaaaacaaacacgtaacaatcccgacagggcttggttaataagagcttgggagcttatgtatttatgtgcgtcatccatgccaccaagcaaagatattggagcatacttgtctgagtatgttcactacattgctcatggcgctacaactgattctgatgttcgagttctagcacttaacacactaaatgcactgaaacgctcagttaaggcaggccctagggttacaattcctgcacgggaggagatagaggctcttttatccagccgtaagcttacaacaattgtttttttcttggatgaaacttttgaagagatcacatatgacatggcaacaactgttgctgatgctgttgaggaacttgctggcattatcaaactttcagtatattctagtttcagcctttttgaatgccgaaaggttgttaatggatccaagtcttcagatgttggcaatgaggagtacattggtttagatgataacaaatatattggtgacctcctatctgaattcaaggcagccaaggatcggaacaaaggagaaattttacactgcaaacttgtatttaaaaaacgcctcttccgtgagtccgatgaggctataactgatccaatgtttgttcagctatcttatgtccagttacaacatgattatattttaggaaactatccagtaggtagggatgatgctgcacagctatctgctctgcaaatattggtcgaaattggctttgttgacaatcctgagtcttgtgttgaatggatatctcttttagagagatttctacccagacaagttgcaattacaagagcaaagcgagactgggagcttgacattgtctcacgctatcagttaatggaacatctgtcaaaagatgatgcaaggcaacagtttctcagaatcttaaggactcttccatatgggaactcagttttcttcagtgtccggaagattgatgatccaataggacttttacctggaagaatcattctgggaataaacaaacgaggggttcattttttccgtccggttcccaaggaatatcttcattctgcagaactgagagatatcatgcaatttgggagcagcaataccgctgttttctttaaaatgagagtcgctggtgttcttcatatctttcagtttgaaactaagcagggcgaggaaatatgtgtagcacttcagacgcatatcaatgatgtgatgctccgcagatattcaaaagcacgctctgctactagcgcggtttctcaaaacgatgtttctcaaacatataaaccaccgaatattgaaatatatgagaaacgtgtccaagaactgtcaaaagcagttgaggaatctgaaaggaaagcagatctgttgaatgaggagttacagaagaagacaaaacaagaaagagatatgcaaaaagaattagaaggtctgagggataccttgcaatctgaacggcaaagcattaaagaagtaacaaatgatcttgataaactaaaatccctttgtgatgaaaaggactcctctttgcaggcttcactgatggagaaaactagactggagaccagattaaaaagtggtcagggccaagaaagcagtaatagaacaggagtatcaggaaatcattttgagagagatactctcccaactgtaggcactgtcaataatagcattgagatgttagcaaagcttgaggaggagttaaaatcctgtaagaaggagcttgatgcatccaaggaattatcaaagaaattaacaatggaaaataatctgcttgaccagaaggttcaaaggcttgaaagagcaaaaagtgaagagaaaagtaatatggaaagagtttatgaggatgaatgttgcaagctgaaatctcgtattgctgaattggagcaaaaactggaaagcagaacacgttccctgaatgttactgaatcgactcttgccttaagaaatgctgaggtggatacattgcaaaacagtctcaaagaacttgacgagttacgagagttcaaagcggatgtggacagaaaaaaccaacagactgctgagattcttaaaaggcaaggagcacaattgattgagcttgaaaatctttataagcaagagcaggttctgagaaagcgttattataacacaattgaagatatgaagggaaaaataagagttttttgtcgtctgcgtcctctaaatgataaggagctcattgaaaaggacaagaatattgtttgcagccctgatgagtttacagttgcacatccatggaaagatgacaagtcaaaacaacatatatatgaccgtgtttttgatgctaacactacccaagaagaagtatttgaggacacgaagtatctagttcaatcggccgttgatggatataatgtttgtatatttgcttatgggcaaactggttctggaaaaacttttacaatttatggatctgaaaacaatcctggtcttaccccaagggctacctctgaactttttagggtgataaagcgtgatggtcacaaatattcattttctttgaaggcatatatggttgagctttatcaggataatcttgtggacctgttgttggccaaaaacgcaacacaccaaaaattggaaataaaaaaggattccaagggggttgttactgttgaaaatgtgacagttgtgaacatttcaagttttgaagaactgagggctataattttaagaggttccgagagaagacacaccgctggaacaaatatgaatgttgagagctcaaggtctcatttaattctttcaatcattattgaaagtaccaacctccagactcaatcttatgcaagaggaaagctaagtttcgtggaccttgctggttctgagagggtgaaaaagtccggctcagcaggaaaacaactgaaagaagctcaaagcatcaataagtctctttctgcattggctgatgtgattggggctttatcttctgatggacaacatataccttatcggaaccataagttgacaatgctgatgagtgattctcttggaggcaatgcgaaaaccttgatgtttgtgaatgtctcaccagcagagtccaacctggaggagacttacaattcactcatgtatgcttcacgagtgcgttgcattgtcaatgatacgagcaagcatgttgccccaaaggaaatcatgaggttgaagaagttaattgcttattggaaggagcaagctggcaagcgtagtgaagacgacgacctggaggaaatacaggaagagaggacaccaaaggagaaagcagataatcgcttgactagctga

SEQ ID NO: 32 - protein, 1226 aa, Oryza sativa
TPTTLSMSIPPELAGAIPLIDRFQVEGFLKAMQKQIHSAGKRGFFSKKSVGPHVREKFTLEDMLCFQKDPIPTSLLKISSDLVSRSIKLFHVILKYMGIDSPAIISLDERIELVAKLYKHTLKRSELRDELFAQISKQTRNNPDRAWLIRAWELMYLCASSMPPSKDIGAYLSEYVHYIAHGATTDSDVRVLALNTLNALKRSVKAGPRVTIPAREEIEALLSSRKLTTIVFFLDETFEEITYDMATTVADAVEELAGIIKLSVYSSFSLFECRKVVNGSKSSDVGNEEYIGLDDNKYIGDLLSEFKAAKDRNKGEILHCKLVFKKRLFRESDEAITDPMFVQLSYVQLQHDYILGNYPVGRDDAAQLSALQILVEIGFVDNPESCVEWISLLERFLPRQVAITRAKRDWELDIVSRYQLMEHLSKDDARQQFLRILRTLPYGNSVFFSVRKIDDPIGLLPGRIILGINKRGVHFFRPVPKEYLHSAELRDIMQFGSSNTAVFFKMRVAGVLHIFQFETKQGEEICVALQTHINDVMLRRYSKARSATSAVSQNDVSQTYKPPNIEIYEKRVQELSKAVEESERKADLLNEELQKKTKQERDMQKELEGLRDTLQSERQSIKEVTNDLDKLKSLCDEKDSSLQASLMEKTRLETRLKSGQGQESSNRTGVSGNHFERDTLPTVGTVNNSIEMLAKLEEELKSCKKELDASKELSKKLTMENNLLDQKVQRLERAKSEEKSNMERVYEDECCKLKSRIAELEQKLESRTRSLNVTESTLALRNAEVDTLQNSLKELDELREFKADVDRKNQQTAEILKRQGAQLIELENLYKQEQVLRKRYYNTIEDMKGKIRVFCRLRPLNDKELIEKDKNIVCSPDEFTVAHPWKDDKSKQHIYDRVFDANTTQEEVFEDTKYLVQSAVDGYNVCIFAYGQTGSGKTFTIYGSENNPGLTPRATSELFRVIKRDGHKYSFSLKAYMVELYQDNLVDLLLAKNATHQKLEIKKDSKGVVTVENVTVVNISSFEELRAIILRGSERRHTAGTNMNVESSRSHLILSIIIESTNLQTQSYARGKLSFVDLAGSERVKKSGSAGKQLKEAQSINKSLSALADVIGALSSDGQHIPYRNHKLTMLMSDSLGGNAKTLMFVNVSPAESNLEETYNSLMYASRVRCIVNDTSKHVAPKEIMRLKKLIAYWKEQAGKRSEDDDLEEIQEERTPKEKADNRLTS

SEQ ID NO: 33 - DNA, 756 bp, Oryza sativa
  CDS (1)..(756)
atggcttcctcttcctcctcccttggccttggcgccatcttccaaagcggctgccccctcctcccgcctcgccccgccgtccgccgcgcgcccaccaggcgccgcgccgtcgccaccaagatctcctgcatcggatgggaccccgagggcgtcctcggcccgccgcagggcggccacatcgtgcgcctcgagttccgccgccgcctcgagagggactccgacgcccgcgaggccttcgagcgccaggtccgcgaggagcacgagcgacgccgccaggagcgcgaggcgcgggtcatccctgacacggacgccggcctcgtcgagttcttcctcgacacggaggcgcgcgagatcgaggtagagatcggcaggctccgccccaggctcaaccagcccttcttcgactacatccagcgcgagatcgcccagatcaagttctcaatcacccgaacagcggaaatggaggaccgattgatcgagttggaagcgatgcaaaaggttctgcttgagggagtggaggcctatgacaagttgcaaaatgaccttgtcagcgcgaaagaacgcctcacaaagatcctgcaatcaagcgacaaaaaatcgacacttcttgaaatggttgaacggaatgagctcaacatgtccatactaacactcctcgatgaaaatatagcaagcgccaagaccaacaatcaggaagaagctgtggctttcatggagaatgttcgctcatccatcctgaaatatattacagtatga

SEQ ID NO: 34 - protein, 251 aa, Oryza sativa
MASSSSSLGLGAIFQSGCPLLPPRPAVRRAPTRRRAVATKISCIGWDPEGVLGPPQGGHIVRLEFRRRLERDSDAREAFERQVREEHERRRQEREARVIPDTDAGLVEFFLDTEAREIEVEIGRLRPRLNQPFFDYIQREIAQIKFSITRTAEMEDRLIELEAMQKVLLEGVEAYDKLQNDLVSAKERLTKILQSSDKKSTLLEMVERNELNMSILTLLDENIASAKTNNQEEAVAFMENVRSSILKYITV

SEQ ID NO: 35 - DNA, 831 bp, Oryza sativa
  CDS (1)..(831)
cacgcgtccgcaaatgagcacattcttgctatggaaaaggaggtagaaaatttgcaggctcagctgaagcaagaatcattgctaaggcagcaggagcaacagaaactttctgaagagtccctattaaggcaacaagagcaacaaaagctaactggagaacagtctcatgctgcttccttggttgcggaaaagaaagatttggaagaaaaaattgctgccttgacgaagaaagcatcagatgaagcttctgaatttgctgcacgcaaggcattttcaatggaagatagggaaaaacttgaaagccaattgcatgatatggctttgatggttgagaggctagagggcagccgccaaaagttgttaatggagattgattctcaatcatcagaaatagaaaagctgtttgaggagaactcagccttgtctacttcataccaagaagctgtagctgttacaatgcaatgggaaaaccaggtaaaagattgtctcaagcaaaatgaagagctacgctctcacttagagaagttaagacttgagcaagctactctattgaaaacaagtaataccactatccagccagatgggcagaacgagaccagcatttcattcccgccagagtttgtaactgagaatctctccctaaaggatcagctcatcaaagaacagagcagatccgaggggttgtcggcagaaataatgaaactttcagctgaactcagaaaagcggtgcaagcgcagaataacctcgcacgcctatatagacctgtgttaagaggcatagagagcaacttaatgaaaatgaaacaagaaacatatgcaacgatccagtaa

SEQ ID NO: 36 - protein, 276 aa, Oryza sativa
HASANEHILAMEKEVENLQAQLKQESLLRQQEQQKLSEESLLRQQEQQKLTGEQSHAASLVAEKKDLEEKIAALTKKASDEASEFAARKAFSMEDREKLESQLHDMALMVERLEGSRQKLLMEIDSQSSEIEKLFEENSALSTSYQEAVAVTMQWENQVKDCLKQNEELRSHLEKLRLEQATLLKTSNTTIQPDGQNETSISFPPEFVTENLSLKDQLIKEQSRSEGLSAEIMKLSAELRKAVQAQNNLARLYRPVLRGIESNLMKMKQETYATIQ

SEQ ID NO: 37 - DNA, 1121 bp, Oryza sativa
  CDS (1)..(1119)
tttgagattgaatgggagctgattgatgaaaagaaagaggagctacaaaaggaagcgatcagaattgctgaagaacgaagagcaataactgagtatctgaagaatgaatctgatatcatcaaacaggagaaggataatctccgtgttcagttcaaaagtaattcagaaacactctctcgtgaacacaaagagttcatgagtaagatgcagcaagaacatgcaagttggctgagtaagattcaacaagaaaggcaagatctgaagagagacattgatatccagagggtggaattgctaaattctgctaaggcaaggcagatggaaatagattcttatttgagggaaagggaggaagagtttgagcagaaaaaggccaaggaactcgaacacatcaattctcagaaggagatgatcaacacaaaattagaacatgttgcagttgaattgcagaaacttaaggatgagagaaaagaagctactttggaacgtgagaggagagagcaagagttgtctgagataaaaggcactattgaagccttgaataatcaacgggagaagctgcaagagcaaagaaaactattacattcagaccgagaagcaattacagtgcaaattcaacaacttaatgtgttggaagaactgaaaattgattctgaaaataagcaactgtctttgttacaacatgataagtcaaagcttggaagtgatataaatgtgaaagacaatcatcatgataactcccattcttcaccaaagcaacgttttggaaggaaactagacctttctccagtctcaacaccgatttcttgggttcgaaaatgtgctcaggtgatattcaaacggtctccagagaagagcgctagccatgatcaatttgtccagaatggtgtgccaaagaaagttggagactctgtggatgttgaagatgtgaatttggactttgcaaaagttggtcaaaagaggcttaatcatttggtttcttgtgaccaaactgaagttttagagccaaaacgaaagcacagaaggagtactattcagaaagttaatggaggggaaatcacttccaactgcctgtcagctctagaagagaaatgctccaagaatgaacatgatgaagcccc

SEQ ID NO: 38 - protein, 373 aa, Oryza sativa
FEIEWELIDEKKEELQKEAIRIAEERRAITEYLKNESDIIKQEKDNLRVQFKSNSETLSREHKEFMSKMQQEHASWLSKIQQERQDLKRDIDIQRVELLNSAKARQMEIDSYLREREEEFEQKKAKELEHINSQKEMINTKLEHVAVELQKLKDERKEATLERERREQELSEIKGTIEALNNQREKLQEQRKLLHSDREAITVQIQQLNVLEELKIDSENKQLSLLQHDKSKLGSDINVKDNHHDNSHSSPKQRFGRKLDLSPVSTPISWVRKCAQVIFKRSPEKSASHDQFVQNGVPKKVGDSVDVEDVNLDFAKVGQKRLNHLVSCDQTEVLEPKRKHRRSTIQKVNGGEITSNCLSALEEKCSKNEHDEA

SEQ ID NO: 39 - DNA, 918 bp, Oryza sativa
  CDS (1)..(918)
tcattgcagaatgaagtcagtgccctagagaaacaaaccttatcccttgccaatgattgtttgcaatcaaataagctcaggatggaggaaaatgcattatcaactcaggttttgaagaccaatatgagatcgagtggtgatcagaatacagtacggacagtaaaagacatggagctgcagaaattgcatgggaccatcaaagcactccagaaggtggttacggatacagccgtccttcttgatcaagagaggcttgatttcaatgccaatctgcaagaagcgaggaagcagattgaggtgctgaagctgaaggagattttggatgatgacttgattgaaatgaattatgagcaaatgctgaaagacattcagcttgacctcatccaaatttcttctggtaataaaaccggttcccttggtcaggccaataaaactgtagcacaggcaaatgagaagatgcttgactctcatggcatcgttggagctagcagtagccatgtacgcaatgatttgagaccgccgcaaagtgagtcgtttgagagggacaattacaaaaggcctccctctgaactgatggtcgtgaaagaactcagcattgacaagcaagagttaccaaggtcaatcaccacggagccgcaccaagagtggaagaacaaggtaatcgaaagattggcttctgatgcacaaaggctcaatgccctccaatccagtattcaggagctcaaaacaaacacagaggcatcagaagggctcgagctcgagagcgttaggtaccaaataagagaagctgagggcttcatcactcagctgatcgatagcaacggtaaactgtccaagaaggctgaggagttcacatctgaagatggtcttgatggggacaacattgacttgaggagcagacaccagcgcaagatcatg

SEQ ID NO: 40 - protein, 306 aa, Oryza sativa
SLQNEVSALEKQTLSLANDCLQSNKLRMEENALSTQVLKTNMRSSGDQNTVRTVKDMELQKLHGTIKALQKVVTDTAVLLDQERLDFNANLQEARKQIEVLKLKEILDDDLIEMNYEQMLKDIQLDLIQISSGNKTGSLGQANKTVAQANEKMLDSHGIVGASSSHVRNDLRPPQSESFERDNYKRPPSELMVVKELSIDKQELPRSITTEPHQEWKNKVIERLASDAQRLNALQSSIQELKTNTEASEGLELESVRYQIREAEGFITQLIDSNGKLSKKAEEFTSEDGLDGDNIDLRSRHQRKIM

SEQ ID NO: 41 - DNA, 687 bp, Oryza sativa
  CDS (1)..(687)
gatagtgctatggaccacaagtatgggcaaaaagatggtgctcctgatgagggttctgtaggtgttcctggtaggaaaaccaaagagacagtaactgctgctgatgcaattattgatgcacttgacactgccgaggaagaagtaaaacgccttgatcagcaccaggaaggacaaaataatgggaatggaactacatttcaacccaatgttataatgcaagggcagtcaccatcggattatgttttgaatgtagtttcaaatgttcgtccaaatgacttggaacaggctctcctttcattgccattctcagatgcacttaagatcatgtcttacttaaaggagtggtctatggttcctttgaaggttgagcttgtttgtagggtttgcctagtgctgcttcaaacacaccacagccaattaactacgacaccatctgcaagatcgatacttacagaactgaaaggcattctttacagtagagtaaaggaatgcaaggatgctataggtttcaaccttgctgcaatggatcatataaaagaattgttggccatgagatcagatgctcccttccgagatgcaagagcgaagctgatggagatcaggcaggaacaatcaagacgatcggataggtcagatggggctgaaaaaaggaaaaagaaaaagcgaagaccatccggtgagagctga

SEQ ID NO: 42 - protein, 228 aa, Oryza sativa
DSAMDHKYGQKDGAPDEGSVGVPGRKTKETVTAADAIIDALDTAEEEVKRLDQHQEGQNNGNGTTFQPNVIMQGQSPSDYVLNVVSNVRPNDLEQALLSLPFSDALKIMSYLKEWSMVPLKVELVCRVCLVLLQTHHSQLTTTPSARSILTELKGILYSRVKECKDAIGFNLAAMDHIKELLAMRSDAPFRDARAKLMEIRQEQSRRSDRSDGAEKRKKKKRRPSGES

SEQ ID NO: 43 - DNA, 438 bp, Oryza sativa
  CDS (1)..(438)
ctactagaggaaagcacgtacgcgaaaggcttggcttcggctgcgggagttgaattgaaagcgttgtcggaagaagtcaccaagctcatgaaccaaaacgagaagcttgcttctgagttggcatcggtgagaagtccaaccccgcgtagagccaacagtggactgagaggtactcggagggatagcatcagtagacgacatgagccagctccaagaagagacaacaacgcaggctacgagagagaaaaggcattagaagctgtgcttatggagaaggaacaaaaggaagcagaactccaaaggagaattgaggagtcgaagcaaaaggaagccttcttggaaagtgaacttgcaaacatgtgggttctagtggcaaaactgaaaaagtctcaaggccatgatcttgaggattttgacaccaaatatattggctcgtaa

SEQ ID NO: 44 - protein, 145 aa, Oryza sativa
LLEESTYAKGLASAAGVELKALSEEVTKLMNQNEKLASELASVRSPTPRRANSGLRGTRRDSISRRHEPAPRRDNNAGYEREKALEAVLMEKEQKEAELQRRIEESKQKEAFLESELANMWVLVAKLKKSQGHDLEDFDTKYIGS

SEQ ID NO: 45 - DNA, 660 bp, Oryza sativa
  CDS (1)..(660)
gttactgactctgttatgaagggaactataagtgctgtagagcaagaatcagctcgccagattgcatctaaggatgcagagatagcattcttgaacgaaaagctgcatcaattcagaaatagtggcctgagtttatctgagggccgagataaactctatgaagaaatttataaccttcgccaacagcttgtgactctttctaagtcactcttgaattctgagtgggggctttcagtatcacactataacaactttgaaggcgcagaagatgaaagtaagcatagagggaatgaaaaatcctctaaagatggtataactaaggaaaatggttctaaaggctccaatgaagatatttttattgatccaacagttctgaagcacatggatagggatgagttggtagcccatttcaataaaatgatgaatcaaatgaaacggcagcatgattcgactttgcaagagaagacggaagagatatttagactaaagcgggagaacctaaaaaaagaaggacctaacccctggcatttacgcaataataaagaatttgagctcatgaggaagaaaatttgggaagttattacaaaattggatgaggtccttgtggagaataaaagaaccatccgcatcaagagtgatgtatttcctggtcaacaagac

SEQ ID NO: 46 - protein, 220 aa, Oryza sativa
VTDSVMKGTISAVEQESARQIASKDAEIAFLNEKLHQFRNSGLSLSEGRDKLYEEIYNLRQQLVTLSKSLLNSEWGLSVSHYNNFEGAEDESKHRGNEKSSKDGITKENGSKGSNEDIFIDPTVLKHMDRDELVAHFNKMMNQMKRQHDSTLQEKTEEIFRLKRENLKKEGPNPWHLRNNKEFELMRKKIWEVITKLDEVLVENKRTIRIKSDVFPGQQD

SEQ ID NO: 47 - DNA, 529 bp, Oryza sativa
  CDS (1)..(528)
tctcctctcctctcctcctccccttccaccccacgcgccccgcacccacccacgcgccgcgccctaaccctaaccctaaccctaaccctactcctctcgctcgccatgtccgagcccgcgtcgcccccaccggccatgcccgaggacgccgcgccgccgcagccgcagccggagccggcggttccagcgggggaggaggccgccccgtctctggagaggaaggaggagttgctgccggtggaggagaagatctcggaattagatgaatcacagtcacagcttatggggagacttcggggactcaaggaggatttgctgaattggaggagcagtttagatacacaagtgacaaaatacaaaagcgaactctctgatatcaaaactgcgctgaatagcgaaattgaacagctgagatcagattttcaagaattgaggaccacccttaagaagcagcaggaagatgtatcaaatagtttgaagaatttggggctacaagatgctactgacaatgatgggaacaaaggaagtg

SEQ ID NO: 48 - protein, 176 aa, Oryza sativa
SPLLSSSPSTPRAPHPPTRRALTLTLTLTLLLSLAMSEPASPPPAMPEDAAPPQPQPEPAVPAGEEAAPSLERKEELLPVEEKISELDESQSQLMGRLRGLKEDLLNWRSSLDTQVTKYKSELSDIKTALNSEIEQLRSDFQELRTTLKKQQEDVSNSLKNLGLQDATDNDGNKGS

SEQ ID NO: 49 - DNA, 342 bp, Oryza sativa
  CDS (1)..(342)
atggagaagtcgccactggcgtggttcaggttgctggtcaacaatgaagacgtcgttgccataaagcagatgcagcatctcatactgggacgattgcaagatagtaatgcagttctcacacattttaatgaatactctgaacaatgctttgcggaggtgtctaatgactttgctggtaaaactcgtcttctcaagtccatgaaggctgatcttgaccatattttcctgaagttgagaggcatgaaatcgaggttagcggcaacatatccagatgcttttcctactggcgcaatggcagagacgatggaccaaagaccggaccttgaaagtcctcttgattaa

SEQ ID NO: 50 - protein, 113 aa, Oryza sativa
MEKSPLAWFRLLVNNEDVVAIKQMQHLILGRLQDSNAVLTHFNEYSEQCFAEVSNDFAGKTRLLKSMKADLDHIFLKLRGMKSRLAATYPDAFPTGAMAETMDQRPDLESPLD

SEQ ID NO: 51 - DNA, 372 bp, Oryza sativa
  CDS (1)..(372)
atggagaagtcgccgccggagacagccgcggcggccgcggaggtggaggcgcggttcaggtcgctggtcgacaccggggacatcggcgccatcaggcagacgcagcacctcatactgggacggttgcaagatagcaatgcagttctcacacattttaacgagtactctgaacaatgctttgcggaggtgtctaatgactttgctagtaaaactcgtcttctcaaatccatgaaggacgatcttgaccatattttcttgaagctgagaagcatgaaatcgaggctagcggcaacatatccagatgcttttcccgatggtgcaatggcaaaaacgatggaccaaagaccggaccttgaaagtccgcttgattaa

SEQ ID NO: 52 - protein, 123 aa, Oryza sativa
MEKSPPETAAAAAEVEARFRSLVDTGDIGAIRQTQHLILGRLQDSNAVLTHFNEYSEQCFAEVSNDFASKTRLLKSMKDDLDHIFLKLRSMKSRLAATYPDAFPDGAMAKTMDQRPDLESPLD

SEQ ID NO: 53 - DNA, 510 bp, Oryza sativa
  CDS (1)..(510)
atgcagggggaggtggatcagccgatgcagatggtgctgcgggtgaagcacccgtcgtcgctgggcggcggcggcggcggcggggaggaggaggccggcgaggcgtcgtcgaggtcggcgctgtcggtgttcaaggccaaggaggagcagatcgagaggaagaagatggaggtgagggagaaggtgttcgcgcagctcggccgcgtcgaggaggagtccaagcgccttgccttcatccgacaggaactggaagggatggcggatccaaccaggaaggaggtggaggtgatcaggaagaggatcgacgtggtgaaccgtcagctcaagcctctcggcaaaacctgcgtcaagaaggagaaggaatacaaagaaatcctggaggcgtacaacgagaagaacaaggagaaggcactgcttgtaaacaggctaattgagctggtgagcgaaagtgagaggatgcgtatgaagaagctcgaggagctgaacaagacggtcgattcactctactag

SEQ ID NO: 54 - protein, 169 aa, Oryza sativa
MQGEVDQPMQMVLRVKHPSSLGGGGGGGEEEAGEASSRSALSVFKAKEEQIERKKMEVREKVFAQLGRVEEESKRLAFIRQELEGMADPTRKEVEVIRKRIDVVNRQLKPLGKTCVKKEKEYKEILEAYNEKNKEKALLVNRLIELVSESERMRMKKLEELNKTVDSLY

SEQ ID NO: 55 - DNA, 1008 bp, Oryza sativa
  CDS (1)..(1008)
atgagctccggcgccgcctcgcccccgccgccgccgcccgccgccgcggaggacgggagggtcacctcgcacgtggatcccttcctcgtcgaggcgctcgacaaccctcgccaccgcctcatggttttgcgtatggcaatggatatacagaaatttatgcagaatcctcaactgcatgaattcgaattccagcattttccaacttcttatctccgctgtgctgctcatcgtgttgcacaacactatggtttagagactacagtagcagatagcttagtagatggttcagttagcaagatagttgcaaagaaaacatctgaaagcaaacttccagttattgcattgtcagaagttcccagcaaacaagcaagaaatgagcatgaagctgcagagaagcttaagtttgttatttgtccaaggcccaaggctttccaaaatggtgcaggtgatgccggtgccaagaacaatgcagcaagaactgttgaagagaggatagaggaatacaacaaagcacgagcacgcattttcaacggttccatttctgatattgaaggcacaagtgatttgggagctttatctgttgcgagagatgaaccaattaatgttgagcctcctgttgatgagaataaggtgaacacaatgaacagccgttccagagttgctgtttttaaggacactgaaaaggatcgtagtgatcctgactatgatcgtaactacaagaggtatgttaggggcccagtgcacgacttcaatgtgagtcctggtggcttcaattttgttgtgccacagtttatgcagtatggtgttggttttatgcagtctgctaatatgtcaagaaaccaaccttctgtgtactttggccaacccgatttatctatgggctcctcttctggaactgctgtctacccacagtggccaactccagcaatgatatacccccattgctatgacaatcttgggcatatgatttctcaggttccggtttaccagtccttcaaccatggctga

SEQ ID NO: 56 - protein, 335 aa, Oryza sativa
MSSGAASPPPPPPAAAEDGRVTSHVDPFLVEALDNPRHRLMVLRMAMDIQKFMQNPQLHEFEFQHFPTSYLRCAAHRVAQHYGLETTVADSLVDGSVSKIVAKKTSESKLPVIALSEVPSKQARNEHEAAEKLKFVICPRPKAFQNGAGDAGAKNNAARTVEERIEEYNKARARIFNGSISDIEGTSDLGALSVARDEPINVEPPVDENKVNTMNSRSRVAVFKDTEKDRSDPDYDRNYKRYVRGPVHDFNVSPGGFNFVVPQFMQYGVGFMQSANMSRNQPSVYFGQPDLSMGSSSGTAVYPQWPTPAMIYPHCYDNLGHMISQVPVYQSFNHG

SEQ ID NO: 57 - DNA, 837 bp, Oryza sativa
  CDS (1)..(837)
cacgcgtccgatggtcgaacacagctagctagctgggctaggatcgccatggatcggggtgaccaccaccacctccagcagcagcaccagttcttgatgccaccgcctgcgccggtggtgccgccgcagctgtgcatgccggcgatgatggcggacgagcagtacatggacctgggcggtggcggggcggcggcggcgccggggaggggcggggccggggagaggaagcggcggttcacggaggagcagatacggtcgctggagtccatgttccacgcgcaccacgccaagctggagccccgcgagaaggcggagctggcgcgcgagctgggcctgcagccgcggcaggtggccatctggttccagaacaagcgcgcgcggtggcgctccaagcagctcgagcacgactacgccgcactccgctccaagtacgacgccctccactcccgcgtcgagtccctcaagcaagagaagctcgctctcaccgtccagttgcacgagctaagagagaggctgagggaacgggaggagaggagcggcaacggtggtgccgccacgacggcagcaagcagcagcagctgcaacggatcaggcagcgaggaggtcgacgacgacgacgacaagaggaacgccgccgcggggtgcctggacctcgagccgccggagagctgcgtgctcggcggcgcgacgtgcgccacgccggcggacgtgtcggtggagtcggatcagtgcgacgaccagcttgactacgatgagggcttgttcccggagtccttctgcgccacgccggagctgtgggagccatggccgctcgtcgagtggaatgcggtggcttga

SEQ ID NO: 58 - protein, 278 aa, Oryza sativa
HASDGRTQLASWARIAMDRGDHHHLQQQHQFLMPPPAPVVPPQLCMPAMMADEQYMDLGGGGAAAAPGRGGAGERKRRFTEEQIRSLESMFHAHHAKLEPREKAELARELGLQPRQVAIWFQNKRARWRSKQLEHDYAALRSKYDALHSRVESLKQEKLALTVQLHELRERLREREERSGNGGAATTAASSSSCNGSGSEEVDDDDDKRNAAAGCLDLEPPESCVLGGATCATPADVSVESDQCDDQLDYDEGLFPESFCATPELWEPWPLVEWNAVA

SEQ ID NO: 59 - DNA, 726 bp, Oryza sativa
  CDS (1)..(726)
  misc_feature (53)..(53): Xaa at amino acid 53 stands for Arg, Ser, or Thr.
  misc_feature (158)..(159): s is c or g
atggggagggggaagatagtgataaggaggatagacaactcgacgagcaggcaggtgacgttctcgaagcgtcggaacgggcttctgaagaaggcgaaggagctatccatcctctgcgatgcggaggtcggccttgtcgtcttctccagcaccggcassctctatgagttctccagcaccaacatgaaaactgtgatagaccggtataccaacgcaaaggaggagctacttggcgggaatgcaacttcagaaattaagatttggcagagggaggcagcaagcttgaggcagcaactgcacaacttgcaagaaagccacaagcaactgatgggtgaggagctttctggcctaggtgttagagacctacaaggtttagagaataggcttgaaataagtctacgtaatatcagaatgagaaaggacaatcttttgaaaagtgaaatcgaggagttacatgtgaagggaagcctaattcaccaggaaaacatcgaactttctagaagcctaaatgtcatgtcgcaacaaaaattggaactgtataacaagcttcaggcctgtgaacagagaggtgccacagatgcaaatgaaagttccagcactccatacagctttcgtatcatacaaaatgctaatatgcctcctagtcttgaattgagccaatcacagcaaagagaaggggagtgcagcaaaacagctgctccagaactgggacttcatctgccttaa

SEQ ID NO: 60 - protein, 241 aa, Oryza sativa
  misc_feature (53)..(53): The 'Xaa' at location 53 stands for Arg, Ser, or Thr.
MGRGKIVIRRIDNSTSRQVTFSKRRNGLLKKAKELSILCDAEVGLVVFSSTGXLYEFSSTNMKTVIDRYTNAKEELLGGNATSEIKIWQREAASLRQQLHNLQESHKQLMGEELSGLGVRDLQGLENRLEISLRNIRMRKDNLLKSEIEELHVKGSLIHQENIELSRSLNVMSQQKLELYNKLQACEQRGATDANESSSTPYSFRIIQNANMPPSLELSQSQQREGECSKTAAPELGLHLP

SEQ ID NO: 61 - DNA, 906 bp, Oryza sativa
  CDS (1)..(906)
atggccgccgccgccgccgcggcgctcatcaccgccgcctccactcctttcccgctggtctccttccgcagccggcgggatggccacctgagcctttcgcctcctcgccgccccggcgccgggcgctgcagggcctcggcgccgacgttccaggggggacccgccgccagctacgcccgcgagatggagcgcctctccgccaaggagtccctcctcctcgccttcagagatgctggagggtttgaatccttggttagtggaaagactacagggatgcagaagattgatgtcaatgagcggattgttgggctcgagcgtctaaaccccactccacggcccacaacatctccctttctggaaggtcgatggaactttgaatggtttggtgacagcagtcctggagcacttgcagcccgtcttctgtttgagaggtcacctacaactgttgcacactttacaggacttgatgtcctgatcaaggatggatactccaaaatttcttccaacgtgaagttcttaaatacggtgcaaagcaagttcctgctgactactcagttgtctgtggagggtcctattaggatgaaagaggaatatgtcgagggcctaatagagatccctaggatcagagaagaaacactgcctgatcaactaaagggtttctttggacaaactgcaggtgctctgcaacaactccctgcccccataagggacgctgtttcagaggggattaaattgccacttaatgggatgttccagcgcctattcatgatttcttacttggatgaggaaatactgattatcagagatgcatctggagcacctgatgtcctaacaagattggaagggccacagccaaattcaattgatggcacatcagacgcagtgctgtcagaatatgaaagctag

SEQ ID NO: 62 - protein, 301 aa, Oryza sativa
MAAAAAAALITAASTPFPLVSFRSRRDGHLSLSPPRRPGAGRCRASAPTFQGGPAASYAREMERLSAKESLLLAFRDAGGFESLVSGKTTGMQKIDVNERIVGLERLNPTPRPTTSPFLEGRWNFEWFGDSSPGALAARLLFERSPTTVAHFTGLDVLIKDGYSKISSNVKFLNTVQSKFLLTTQLSVEGPIRMKEEYVEGLIEIPRIREETLPDQLKGFFGQTAGALQQLPAPIRDAVSEGIKLPLNGMFQRLFMISYLDEEILIIRDASGAPDVLTRLEGPQPNSIDGTSDAVLSEYES

SEQ ID NO: 63 - DNA, 789 bp, Oryza sativa
  CDS (1)..(789)
atgtcggcacaggcggagctttcccgtgaggagaatgtgtacatggccaagctcgctgagcaagccgagaggtacgaggagatggtcgaattcatggagaaggtggccaagacggttgactctgaggagctcaccgtggaggagcgcaacctcctgtctgttgcatacaagaatgtgattggagcccgccgtgcgtcatggcgcattatctcctccattgagcagaaggaggaaagccgtggtaacgaggaccgtgtcacactcatcaaggactaccgtggcaagatcgagactgagctcaccaagatttgcgacggcattctcaagctgcttgaatcccaccttgtcccctcttccactgcccctgagtccaaggtcttctacctcaaaatgaagggtgactactacaggtaccttgccgaatttaagaccggggctgagaggaaggatgctgctgagaataccatggtggcatacaaggctgctcaggacattgctttggctgagctgcctcctactcatccaattaggcttgggctagctcttaacttctcagtgttctactatgagatcctcaactcgcctgatcgtgcttgcaacctcgcaaagcaggcttttgatgaggccatttcggagctggacaccctgagcgaggagtcctacaaggacagcactttgatcatgcaactcctccgtgataacctgaccctgtggacttcaaacatttcggaggaccccccggaaaagatcagggaagttccaaagcgcgactccagcgaggggcagtaa

SEQ ID NO: 64 - protein, 262 aa, Oryza sativa
MSAQAELSREENVYMAKLAEQAERYEEMVEFMEKVAKTVDSEELTVEERNLLSVAYKNVIGARRASWRIISSIEQKEESRGNEDRVTLIKDYRGKIETELTKICDGILKLLESHLVPSSTAPESKVFYLKMKGDYYRYLAEFKTGAERKDAAENTMVAYKAAQDIALAELPPTHPIRLGLALNFSVFYYEILNSPDRACNLAKQAFDEAISELDTLSEESYKDSTLIMQLLRDNLTLWTSNISEDPPEKIREVPKRDSSEGQ

SEQ ID NO: 65 - DNA, 325 bp, Oryza sativa
  CDS (1)..(324)
gagaagagtgatgtgcaaagtaccttggaaatggagcttgatagaaggtcaaatgattggtcagtcaaactggcagaattccaatcagaagaacagcgattacgggaaagagtaagagagcttgcagagcagaatgtatcttttcaaagagaagttactttacttgaatcgaacagaattgatgtttctaataagataacaagtttagaactgcaaaacaaacagctcaatgacgagctacagaaagtaaagaaagagcatgatactcttttgaagtcatcggttgagttgaatgataatttaacgaaaactgcagagggttatg

SEQ ID NO: 66 - protein, 108 aa, Oryza sativa
EKSDVQSTLEMELDRRSNDWSVKLAEFQSEEQRLRERVRELAEQNVSFQREVTLLESNRIDVSNKITSLELQNKQLNDELQKVKKEHDTLLKSSVELNDNLTKTAEGY

SEQ ID NO: 67 - DNA, 1443 bp, Oryza sativa
  CDS (1)..(1443)
ccacgcgtccggagagagagagagaagaaggatgctgaggagggaaaggttgaggatgttgatgaggagaaggaagagaaagagaagaaaaagaagaagatcaaggaagtctctcacgagtggaacgtgatgaacaagcagaaacccatttggttgaggaagccagaggagatcaccaaggaagagtacgctgctttctacaagagcttgacaaacgactgggaggaacatctggctgtcaagcacttctctgtggagggtcagcttgaattcaaggccatcctgtttgtaccaaagagagcgccatttgacctctttgacaccaggaagaagcaaaacaacatcaagctgtacgtacgccgggtgtttatcatggacaactgtgaggagttgatcccagagtggctcagctttgtcaagggcattgttgattctgaagaccttcccctcaacatctcacgtgagatgctccagcagaacaagatcctgaaggtgatccgcaagaaccttgtgaagaagtgcgtggagctcttctttgagatcgctgagaacaaggaagactacaacaagttctacgaggctttctccaagaatctcaagcttggcatccatgaggattccaccaacaggaccaagattgctgagctcctgaggtatcactccaccaagagtggtgatgagttgaccagcctcaaggactacgtaacccggatgaaggagggccagagtgagatctattacatcactggtgagagcaagaaggctgttgagaactcccccttcctcgagaagctgaagaagaagggttatgaggtcctgtacatggttgatgccattgatgagtacgctgttggtcagcttaaggagtttgaaggcaagaagctcgtctctgccaccaaggaaggtctgaagcttgatgagagtgaggacgagaagaagcggcaggaggaactcaaggagaagttcgagggtctgtgcaaggtgatcaaggaggtgctcggtgacaaggtggagaaggttgttgtctctgaccgtgtggtggactctccctgctgtctagtcactggggagtatggctggactgctaacatggagaggatcatgaaggcccaggctctgagggactccagcatggccggctacatgtctagcaagaagaccatggagatcaacccggagaatgccatcatggacgagctccgcaagcgtgccgatgcggacaagaatgacaagtccgtgaaggacctggtgatgctgctcttcgagactgccctgctgacctccggtttcagcttggaggaccccaacaccttcggcaccaggatccaccgcatgctcaagctcggcctgagcatcgacgaggacgagtccgccgaggctgacgccgacatgccgccgctggaggacgacgccggcgagagcaagatggaggaggtcgactaa

SEQ ID NO: 68 - protein, 480 aa, Oryza sativa
PRVRREREKKDAEEGKVEDVDEEKEEKEKKKKKIKEVSHEWNVMNKQKPIWLRKPEEITKEEYAAFYKSLTNDWEEHLAVKHFSVEGQLEFKAILFVPKRAPFDLFDTRKKQNNIKLYVRRVFIMDNCEELIPEWLSFVKGIVDSEDLPLNISREMLQQNKILKVIRKNLVKKCVELFFEIAENKEDYNKFYEAFSKNLKLGIHEDSTNRTKIAELLRYHSTKSGDELTSLKDYVTRMKEGQSEIYYITGESKKAVENSPFLEKLKKKGYEVLYMVDAIDEYAVGQLKEFEGKKLVSATKEGLKLDESEDEKKRQEELKEKFEGLCKVIKEVLGDKVEKVVVSDRVVDSPCCLVTGEYGWTANMERIMKAQALRDSSMAGYMSSKKTMEINPENAIMDELRKRADADKNDKSVKDLVMLLFETALLTSGFSLEDPNTFGTRIHRMLKLGLSIDEDESAEADADMPPLEDDAGESKMEEVD

SEQ ID NO: 69 - DNA, 1263 bp, Oryza sativa
  CDS (1)..(1263)
atggggggccggaagcgcgcgctgctggtgggcatcaactacccgggcaccaaggcggagctcaaggggtgccacaacgacgtggcccgcatgcgccgcgccctcgtcgaccgcttcggcttcgacgaggccgacatccgcgtcctcgccgacgccgaccggtcggcgccgcagcccacgggggccaacatccgccgggagctcgcgcgcctcgtcggcgacgcccgccccggggacttcctcttcttccactacagcggccacgggacgcggctgccggcggagaccggccaggacgacgacaccggctacgacgagtgcatcgtgccctccgacatgaacctcatcacagaccaagatttcacagaactcgttcaaaaggtcccagatgactgcttattcaccatagtatctgactcctgccacagcggtggtctacttgacaagaccaaggagcagattgggcacagcaccaagcagaaccaggcccagcagatcaagcgagaagaacgttctgactctggcaccggcggtttccgatccttcctcaaagaaaccctcaaagaaacagtccgggacgcgttcgagtctcgaggagttcacatccctcaccagagcagccgccgcaacgacgacgaggatgaggagccacacatgggctcatcctcccatggtggcgatcgcatcaagaaccggtcattgcccctctcgacgttgattgagatgctcaaggagaagaccggcaaggacgacattgacgttggctcgatccggatgacgctgttcagcctcttcggtgacgacgcgagccccaagatcaagaagttcatgaaggtcatgctgaccaagctccaggagggccagcacggcggcgtgatgggcttggtgggcgccctggcgcaggagttcatgaaggctaagctggagggcaaccaggaggcggacgccctcgagccggccatgaaacaggaggtgcacagcgtccacgaggcgtacgccggcacgacggcgagggtgagcaatggcgtgctgattagcgggtgccagaccgaccagacatcggcggacgccacgacgcccaagggcgtgtcctacggcgcgctcagcaacgccatccagaccatcctgtcggagaagagcggcagggtgacgaacaaggagctcgtgctgagagcgcgcgagttgttgtccaagcaagggtacacccagcagcctggcctttactgcagtgacaagcacaccagtgtggccttcatatgctga

SEQ ID NO: 70 - protein, 420 aa, Oryza sativa
MGGRKRALLVGINYPGTKAELKGCHNDVARMRRALVDRFGFDEADIRVLADADRSAPQPTGANIRRELARLVGDARPGDFLFFHYSGHGTRLPAETGQDDDTGYDECIVPSDMNLITDQDFTELVQKVPDDCLFTIVSDSCHSGGLLDKTKEQIGHSTKQNQAQQIKREERSDSGTGGFRSFLKETLKETVRDAFESRGVHIPHQSSRRNDDEDEEPHMGSSSHGGDRIKNRSLPLSTLIEMLKEKTGKDDIDVGSIRMTLFSLFGDDASPKIKKFMKVMLTKLQEGQHGGVMGLVGALAQEFMKAKLEGNQEADALEPAMKQEVHSVHEAYAGTTARVSNGVLISGCQTDQTSADATTPKGVSYGALSNAIQTILSEKSGRVTNKELVLRARELLSKQGYTQQPGLYCSDKHTSVAFIC

SEQ ID NO: 71 - DNA, 1530 bp, Oryza sativa
  CDS (1)..(1530)
atggcggcggcggcgaccggaggccgctgcccgatggccccttcgccggattggtcatctgcgtcaccgggctatccaaagagcgaggactcaggtgaaggaggcgaactgagaggatgggaggcgagtacagcgggagcctgcatcccaagtgcacccacctacgcgcagcacagcttcgccggccgcaagtttgagcacgcggtcaagcatggcgcgaagaatggcctctttgttgtaacacttggttggcttgtggattgcgtgcggaggagcatgaggttggatgaatcgttatatagcatcaagaacattggggagaatggaatgccactcggggagttcaaccggcttgtcggcgctcctgttagtgggaattcttgccttccaccgatgatgtttcaggaaaaaacattttcagacacgaccgaaaagcatcggcttcagacatctagaaaagaacatgaccatgatgaatttctctttacaaacgactcgatctacattgaccctgggatatctggtgaaatgaggaagaagtatctgaatgctgctactagagaaggtgcaaaattgttggaccactggtttattggctgtcatgcgacatatgttgtgtgtgaggacgcttctgtcaagagatatgttggtcattcagacaacattgtaactccactttggatattgaaaaccgcaaaggaaaaaggtttgcagcgtcttgtccatttgtcttcggacctggctaggcaggttgccacgattcttgaaaatgcccagacatttcaagagaatagaaaaattggggatgttccttctgtcaattcaaactccagtggagtaccatcaacccaaggggagatagatgaaattcatcaagagaggcaaaaatttgttgaagtagcaaagaaaaatgtccgagatcgccgtgctcgccgtatgcagtcatgtgaagtaccaatccatccaatcacgcctgtgaaacttatggaatcaatctgttggaccgtatctgagccaactacgtccgcatgcatttatacggagttttcatggtcagacgatgcctttgagcaacaaagcactactttcttcgatgcgaatggggatggcaaggatgatcagtcaagcgatagtttcacccgcccactaagagaaagtgagaagagtgaagtgatctttaagaaccacttccttaccgtactcttccccattgatcgttttggtgagcttggaccttcctcaaggacattcttcagcaatggtggtttcacacgcatacaagtgcttgatcacatctacaacttctaccaggaaaatatgtcttccgatgagataaatgtagccctgcaaacggattcacgacatgctgatcgacttcgctcgctgtacgcaagtactgaatcagcagaaagaggttttgtaacattcaaaagaattgattttttgggaagccgaagaagttttgaggggctaaaacgcctcagcagagagaacaatagcaatgtatatgagcttgtgattagggcataa

SEQ ID NO: 72 - protein, 509 aa, Oryza sativa
MAAAATGGRCPMAPSPDWSSASPGYPKSEDSGEGGELRGWEASTAGACIPSAPTYAQHSFAGRKFEHAVKHGAKNGLFVVTLGWLVDCVRRSMRLDESLYSIKNIGENGMPLGEFNRLVGAPVSGNSCLPPMMFQEKTFSDTTEKHRLQTSRKEHDHDEFLFTNDSIYIDPGISGEMRKKYLNAATREGAKLLDHWFIGCHATYVVCEDASVKRYVGHSDNIVTPLWILKTAKEKGLQRLVHLSSDLARQVATILENAQTFQENRKIGDVPSVNSNSSGVPSTQGEIDEIHQERQKFVEVAKKNVRDRRARRMQSCEVPIHPITPVKLMESICWTVSEPTTSACIYTEFSWSDDAFEQQSTTFFDANGDGKDDQSSDSFTRPLRESEKSEVIFKNHFLTVLFPIDRFGELGPSSRTFFSNGGFTRIQVLDHIYNFYQENMSSDEINVALQTDSRHADRLRSLYASTESAERGFVTFKRIDFLGSRRSFEGLKRLSRENNSNVYELVIRA

SEQ ID NO: 73 - DNA, 1458 bp, Oryza sativa
  CDS (1)..(1458)
atggcgctctccgtggagaagacctcgtcggggagggagtacaaggtgaaggacctctcccaggcggacttcggccgcctcgagatcgagctcgccgaggtcgagatgccggggctcatggcgtgccgcgccgagttcggcccctcccagccgttcaagggcgcccggatctccgggtccctccacatgaccatccagaccgccgtcctcatcgagaccctcaccgcccttggcgccgaggtccgctggtgctcctgcaacatcttctccacgcaggaccacgccgccgccgccatcgccagggactccgccgccgtgttcgcctggaagggggagaccctcgaggagtactggtggtgcaccgagcgctgcctcgactggggcgtcggcggcggccccgacctcatcgtcgacgacggcggcgacgccacgctgctcatccacgagggcgtcaaggccgaggaggagttcgagaagtcaggcaaggtccccgacccggagtccaccgacaacgccgagttcaagatcgtgctcaccatcatccgcgacggcctcaagtccgaccccagcaagtaccgcaagatgaaggagaggctcgtcggagtctccgaggagaccaccaccggtgtcaagaggctctaccagatgcaggagaccggcgccctcctcttccccgccatcaacgtcaacgactccgtcaccaagagcaagtttgacaacctgtatggttgccgccactctctccctgatggtctcatgagggctaccgatgttatgatcgctggcaaggttgccgtggtctgcggttatggtgatgttggcaagggctgtgctgctgctctcaagcaggctggtgcccgtgtcattgttactgagattgaccccatctgtgccctccaggcccttatggagggtctccaggtcctcaccttggaggatgttgtctcggaggctgacatctttgtgaccaccactggcaacaaggacatcataatggttgaccacatgaggaagatgaagaacaatgccatcgtttgcaacattggtcactttgacaatgagattgacatgctcggccttgagacctaccctggtgtcaagcgcatcaccatcaagcctcagaccgaccgctgggtcttccctgagaccaacactggcatcattgtccttgctgagggtcgtctcatgaaccttgggtgcgctactggccaccccagttttgtcatgtcctgctcattcactaaccaggtcattgctcagcttgagctgtggaaggagaagagcactggcaagtacgagaagaaggtgtacgttcttcccaagcacctcgacgagaaggtggccgccctccacttgggcaagcttggtgccaggctgaccaagctctccaagtcgcaggctgactacatcagcgttccagttgagggtccctacaagcccgcgcactaccggtactag

SEQ ID NO: 74 - protein, 485 aa, Oryza sativa
MALSVEKTSSGREYKVKDLSQADFGRLEIELAEVEMPGLMACRAEFGPSQPFKGARISGSLHMTIQTAVLIETLTALGAEVRWCSCNIFSTQDHAAAAIARDSAAVFAWKGETLEEYWWCTERCLDWGVGGGPDLIVDDGGDATLLIHEGVKAEEEFEKSGKVPDPESTDNAEFKIVLTIIRDGLKSDPSKYRKMKERLVGVSEETTTGVKRLYQMQETGALLFPAINVNDSVTKSKFDNLYGCRHSLPDGLMRATDVMIAGKVAVVCGYGDVGKGCAAALKQAGARVIVTEIDPICALQALMEGLQVLTLEDVVSEADIFVTTTGNKDIIMVDHMRKMKNNAIVCNIGHFDNEIDMLGLETYPGVKRITIKPQTDRWVFPETNTGIIVLAEGRLMNLGCATGHPSFVMSCSFTNQVIAQLELWKEKSTGKYEKKVYVLPKHLDEKVAALHLGKLGARLTKLSKSQADYISVPVEGPYKPAHYRY

SEQ ID NO: 75 - DNA, 762 bp, Oryza sativa
  CDS (1)..(762)
atggggttcctcgaggactttcaagccagtgttgaagcattgccagctatgctgcaaaggaactattcattaatgcgggagctagataaaagcttgcaaggtgtgcaaacgggaaatgagcagcgctgtcagcaagaaatagaagacattaagcatggacttgaatctggaagtattacatatgacccggcaaagcttaaattttctgatgaagcaatcgaggagcagaagcattgtgttcgaattgctgatgagaaggtggctttagccagtcagacttatgacctggttgatgctcatatccaacagctagatcagtttatgagaaaacttgaagaacttcgacaagaaaaggaggcagctacaactgctgctgctgctgctgctgcggcggctgctagtgttgctacaggtacgcctgttgctgctactgtaacagctagcgctggtacttcaactgctgacaatactccaaaaggtggaaggtctagcgaaagaggccgagggggtcgaaagaagactgctaaggtgcccactgagcaaccagcaccagccatagatttagaactgcctgtggatcctaacgaaccaacatattgcctctgcaaccaagtcagctacggagagatggtcgcatgcgacaataatgattgcaagatcgaatggtatcactttgggtgcgtcggcgtgaaagagcatccgaaggggaagtggtattgcccaagttgcattggattccaaaagaagcgaaaaggaaagtga

SEQ ID NO: 76 - protein, 253 aa, Oryza sativa
MGFLEDFQASVEALPAMLQRNYSLMRELDKSLQGVQTGNEQRCQQEIEDIKHGLESGSITYDPAKLKFSDEAIEEQKHCVRIADEKVALASQTYDLVDAHIQQLDQFMRKLEELRQEKEAATTAAAAAAAAAASVATGTPVAATVTASAGTSTADNTPKGGRSSERGRGGRKKTAKVPTEQPAPAIDLELPVDPNEPTYCLCNQVSYGEMVACDNNDCKIEWYHFGCVGVKEHPKGKWYCPSCIGFQKKRKGK

SEQ ID NO: 77 - DNA, 2949 bp, Oryza sativa
  CDS (1)..(2949)
atgttcaagtcggcgcggtggcgcggcggcggcggggccggggggaaggcgaaggcggtgttcaagctgcagttccacgccacgcaggtgccggaggtgggatgggaggcgatgatggtggtggtgacgccgcgggacgcgggccggccgacggcgaggacggagagcgcgcaggtcgccgacggcgcgtgccagtggcccgccccggtctacgaggccaccaagctcccttcctccggcaaggacaagatctaccagttcctcgtctacgacacgggctcgaccaaggcggcgctgctcggggaggcgacgctgaacctgtccgagtacgccgacgcgttcaagccgtggatcgtcacgctgccgctcagcggaagccccggcgcgcagctgcacgtgaccatccagcgggtggtgggtggtggtggcggcggcggcggtgggtgcggtgacgacgccagtgagaacggcggcgacgtgtcgccggtggtggcgaggacgccgccgaggaagacgctgcagagccagctgagccggtgcgaggacgaggaggcggagaaggcgagggcggcggcggcggcggcggatgcgatgagccctatgcaagacggattggtgataaacaaacctcctgggatgaggttttcagcgagaagaaacatgcgtgggcctgtcgatcaccttcacaattccaacagctttgatgccatttcggtgtcgggttcagatgggagctcagggagatttacccccaaaaacaatgcaagtatgcacagcacatttcttcaggagggcaccaataccctctcacccctgaggaacacattgaccagctccggtgactggtcgggaagctcagctcctgatgctagcaccgacgggtcaaccagcaactccggtgaggcggggttgagggaggcagaggatgatgtggagaagctaagaagtgagatagccactttgacgcggaaattggatgtctccgatatggagttgcaaacactgagaaagcaaattgtgaaggagagtcgacgagggcaagatctttccaaggaagtgggtagcttgagggatgagagggatgctctcagaagagaatgtgaagcactcagagggatgaaaaagactatccatgatgcaaacggatctggtaaaagactatcaagcggggaagacccgtggtcgcagattgaagagctaaagcaagaactgggccatgagaagaatctaaatggagatctgcatttacaattgcagaaaatgcaggaatccaactctgagctacttctggctgtgaaggatcttgatgagatgctggagcagaagaacaaggagatatcacttttgcatgaagaaacactggaggatccccaggaggctgaatatgagctagcattgtcaaatgtgcataatgctggacacaaaatagacatatctgaaacaagttcagttcaagagaaagaagatgagctgatgctggatgcattggcaaagacaaccgatggcatcgctacctctgaacttcaaaataaaattgttgagctgagcaatgaaatcgagttgtataagaaggaccgtgaagacctcgagatgcaaatggagcaacttgcacttgactatgagatcctgaagcaagagaaccatgacatctcttctaggctggagcaaacacagttgagggagcagctaaggatgcagtacgagtgttcagcacatttgtctataataagcgatcttgaagccaatgttgagagcctggagaatgaactccaggaacaatccaaaagattagaggctgacatacaagaggtaatgcgtgcaaaggttgaacaagagcaaagggccataaaggccgaggagtccctgaggaaagcaagatggaacaatgccactactgctgaacgactccaggaggaattcaagatgttgtcttcacaagtttcctctgctttcagcgcaaatgaacagttgcttatgcaagctagaaaagaggctgcagagctacagttacagaagggccagttggaagaattactacagaaggcacaagaagatcttggatcaatccaagaacaacaccgagtgaaggttcaacagttactgaccttagtggatttcaagtcaaaggagacagacaggctggtaatggagcttaaaagcaagagtgatgagttccagaatcagaagagatgcaacgaagcaaagttaagtgttctctcagaagaaatagatcaactcaaagctaagattgagaatctgtcaaatgaacgagacaatctcttcgaagagaatgagcagaaggacaaggaattagctgcaaattgtcaaaaggatatgttcttgcaggatagagatgctgagatagctttgctcaacaaagaacttgcttcaatcaaggaccaagtgcagacatatttagaggagataaacactttaaaaagttcaaagaatgaaaaggaggagatgatcgagaggctgcaatcagagattagatcgttgaaattcgagtatgacaacctgaaaattttgatgtccactaatgactctgagaaacacaaccttgcttcccaagtgctgaagcttcggagagcccttgaaagcagggaggatgtgaaacaaaatggtgtcaaatcagatgaggacaaccaccatgctacttctaagcgcatcaagcatgacgacggcaccaccgggagccgtaacgtgctgccaagcaccaacagacacaatgcaaatggtgactgcaatgggcatgacaggagggatgcagctcatgatcagtcggtaaaggagctggaaatcctgaaggagaggaacactgcactggaggaagagctcaaagaactgcacgggcggtactcggagataagcctgaaattcgcggaagtcgaaggcgagaggcagcagctggtgatgacggtgcgcgccctgaagaactccctgaggtga

SEQ ID NO: 78 - protein, 982 aa, Oryza sativa
MFKSARWRGGGGAGGKAKAVFKLQFHATQVPEVGWEAMMVVVTPRDAGRPTARTESAQVADGACQWPAPVYEATKLPSSGKDKIYQFLVYDTGSTKAALLGEATLNLSEYADAFKPWIVTLPLSGSPGAQLHVTIQRVVGGGGGGGGGCGDDASENGGDVSPVVARTPPRKTLQSQLSRCEDEEAEKARAAAAAADAMSPMQDGLVINKPPGMRFSARRNMRGPVDHLHNSNSFDAISVSGSDGSSGRFTPKNNASMHSTFLQEGTNTLSPLRNTLTSSGDWSGSSAPDASTDGSTSNSGEAGLREAEDDVEKLRSEIATLTRKLDVSDMELQTLRKQIVKESRRGQDLSKEVGSLRDERDALRRECEALRGMKKTIHDANGSGKRLSSGEDPWSQIEELKQELGHEKNLNGDLHLQLQKMQESNSELLLAVKDLDEMLEQKNKEISLLHEETLEDPQEAEYELALSNVHNAGHKIDISETSSVQEKEDELMLDALAKTTDGIATSELQNKIVELSNEIELYKKDREDLEMQMEQLALDYEILKQENHDISSRLEQTQLREQLRMQYECSAHLSIISDLEANVESLENELQEQSKRLEADIQEVMRAKVEQEQRAIKAEESLRKARWNNATTAERLQEEFKMLSSQVSSAFSANEQLLMQARKEAAELQLQKGQLEELLQKAQEDLGSIQEQHRVKVQQLLTLVDFKSKETDRLVMELKSKSDEFQNQKRCNEAKLSVLSEEIDQLKAKIENLSNERDNLFEENEQKDKELAANCQKDMFLQDRDAEIALLNKELASIKDQVQTYLEEINTLKSSKNEKEEMIERLQSEIRSLKFEYDNLKILMSTNDSEKHNLASQVLKLRRALESREDVKQNGVKSDEDNHHATSKRIKHDDGTTGSRNVLPSTNRHNANGDCNGHDRRDAAHDQSVKELEILKERNTALEEELKELHGRYSEISLKFAEVEGERQQLVMTVRALKNSLR

SEQ ID NO: 79 - DNA, 1704 bp, Oryza sativa
  CDS (1)..(1704)
  misc_feature (71)..(71): Xaa at amino acid 71 stands for Leu, or Phe.
  misc_feature (213)..(213): k is g or t
tggaatccagattctgaatcttcccaggctactggtggttttactgtcgcattctctttgtcagttgtgcagagtgaatgtcagcagcttctgtgtgaaattttgcgggcaactccagaggctgctactgctgatgcagctgttcagacagctaggcttgcaaataaggacccagtgaaggaaaagagggatggatcagaaggcctttctttkgcttttcgcattacggatgcagcaatcactgcgccaaacgaaggtcaaggatggcgaagaaactcaacagtaccacaagaaggctatggaacagcaagtgtcatacctgaccaagggattttccttgcagcatcagtttaccgtcctgtatttgagtttatgaataaaattggactgatgcttccgcagaaatattggcaacttgggaatgatgggctattggcttttgtgaacaacttcttgaaggagcacttcttgccagcaatatttgtagattaccgaaaatgtgttcaacaggctatatctagtccagccgcatttagaccgcgtgtccatgcaacctcagtgtatagtccattagtcgaaaatgggcgtcctgtactacaagggcttttggctgtcgatataatagccaaagaggtacttggatgggttcaattgatgccgaactatgccactgagcttgttgagtatgttcgcacatttttagaacgtacacatgaaagatgccgtgcatcctatatggaggctgtccttgaaaaacaaagttatattctcctctcaaggaatgatgttgaaagtttaatgcgcttggatccagcaaatctatctttacaaaattcttttggtcaacttgaccacagtattccagatgcagaagctgtagaagtagagattgaactaagtgatctcctattggatatgtgcccaataaaacaggaaaacttgatccatgatgaccagaaattgatactgttagcatctcttagtgattcattggaatatttagcggattcagttgaaaggcttggagagtcattcattaattcatctaccatgttggagaacaaaaatcacatccaccagggtcgccatactcgctcaactagtgcaattccgaaaagccttgcatcacttgctaatgagtatagaaggctagcaattgattgtgtcagagtcttgagattggaaatgcaattagaaactatatatcacatgcaggaaatgacgaaaagagaatatgtagaagatcaagatgctgaagatcctgatgacttcatcatctcactaacaactcagatcgcacgtagggatgaagaaatggctccttatattgcagaatctaaaaggaattatgtatttggtgggatttctagcgttgctgctaatgcatcgataaaggcactcgctcagatgaagtcgatcaatttgttaggggtccaacaaatatgcagaaattctatagcactagaacaggctctggcagccataccctcaattgacagtgaagccgtccaacagagaatagatcgtgttcggacattctacgaactcttgaatttgcctttcgagtctttgcttggatttattgcagaacatgaatatttattttctgcaaaagaatacttgagcgtgttaaaggtcaacgttcctggaagagagatgccaatggatgctgaacgacgcatctctcagattttgggccattaa

SEQ ID NO: 80 - protein, 567 aa, Oryza sativa
  misc_feature (71)..(71): The 'Xaa' at location 71 stands for Leu, or Phe.
WNPDSESSQATGGFTVAFSLSVVQSECQQLLCEILRATPEAATADAAVQTARLANKDPVKEKRDGSEGLSXAFRITDAAITAPNEGQGWRRNSTVPQEGYGTASVIPDQGIFLAASVYRPVFEFMNKIGLMLPQKYWQLGNDGLLAFVNNFLKEHFLPAIFVDYRKCVQQAISSPAAFRPRVHATSVYSPLVENGRPVLQGLLAVDIIAKEVLGWVQLMPNYATELVEYVRTFLERTHERCRASYMEAVLEKQSYILLSRNDVESLMRLDPANLSLQNSFGQLDHSIPDAEAVEVEIELSDLLLDMCPIKQENLIHDDQKLILLASLSDSLEYLADSVERLGESFINSSTMLENKNHIHQGRHTRSTSAIPKSLASLANEYRRLAIDCVRVLRLEMQLETIYHMQEMTKREYVEDQDAEDPDDFIISLTTQIARRDEEMAPYIAESKRNYVFGGISSVAANASIKALAQMKSINLLGVQQICRNSIALEQALAAIPSIDSEAVQQRIDRVRTFYELLNLPFESLLGFIAEHEYLFSAKEYLSVLKVNVPGREMPMDAERRISQILGH

SEQ ID NO: 81 - DNA, 531 bp, Oryza sativa
  CDS (1)..(531)
atgtccacggaaagcggcatgctacgaggcgcaggcgtcggggtggtctccggcgcggtcttctccatcgaggccgtcgaatcgtgcatcgaaatctggagatcaagtgaatcaggaaaatacagcattatcttcgtgcttgacatcatctctagcctcttcagtggaaggattgtgtgggagaaggtcagcccagcactgcagcgcgcggtgcagagtcagatgagtctactgagtacaccattcattgacaacaatgacctttttgaaaccggaaatacaggaggcatgtcaagagatctaattaacagaatcccaaagaccacattcagcgctgcaaccaatcctgatcaggaaactgataactgttgtgcagtttgccttcaggattttggagcatcgcaatttgttcgggtcctgcctcattgccagcacacgttccacgcacgatgcatcgacaactggcttttcaggcacgcatcatgcccgctatgcagggctggtgtgcatatagaccatatacatatgtaa

SEQ ID NO: 82 - protein, 176 aa, Oryza sativa
MSTESGMLRGAGVGVVSGAVFSIEAVESCIEIWRSSESGKYSIIFVLDIISSLFSGRIVWEKVSPALQRAVQSQMSLLSTPFIDNNDLFETGNTGGMSRDLINRIPKTTFSAATNPDQETDNCCAVCLQDFGASQFVRVLPHCQHTFHARCIDNWLFRHASCPLCRAGVHIDHIHM

SEQ ID NO: 83 - DNA, 1383 bp, Oryza sativa
  CDS (1)..(1383)
gcttcctttcggactgttggtgctaaaatcactcaggaaactggtgatttctttgttagcgatgcagagggtgacccagacaaaccaactgatggtttttcctctattgatgaggctataggcgcattgcatgaaggaaagtttgttattgctgtagatgatgaaagcggtgataatgaaggggatcttgtcatggcagctacgctggcagacccagaatctattgcattcatgatcaggaatggttctgggatcatctcagtgggcatgaaggaagaggacttaacaagattgatgattcctatgatgtctccaattgcagaaattgaggatatttcagctgctgcttccacagtaacagtggatgccagagtgggcatatcaaccggcgtctcggctgcagatagggcaaaaacgatttttactctagcctcccctgattctaagccaactgacctcagaagaccaggccatatattccctctaaaataccgaaacggtggtgtgctaaaaagagctggacatactgaggcatccgtcgatcttgtcgcgttggctggcttgcgccctgtgtctgtcctgtcaaccgtcatcaacccagtggatggttcaatggcaggaatgccagtgctgaaacagatggctttggagcatgatatcccaattgtttcaatcgctgatctcatccggtatagaaggaagagggagaagctggtggaactgattgctgtatctcgtttgccgacgaaatggggccttttccgagcttactgctaccaatccaagcttgatggaaccgagcacattgctgttgcaaagggcgacatcggcgacggcgaggacgtcttggtgagggtccattccgagtgcctgaccggcgacatcctcggctccgcccgctgcgactgcggcaaccagctggacctggcgatgcagctcatcgacaaggccggccgcggcgtcctcgtctacctccgcggccacgagggccgcggcatcggcctcggccagaagctccgcgcctacaacctccaggacgacggccacgacaccgtccaggccaacgtcgagctcggcctcgccgtcgactcccgcgagtacggcatcggcgcccagattctgcgggacatgggggtgcgcacgatgcggctgatgacgaacaacccggcaaagttcgtcgggctcaagggctacgggctcgccgtcgtcggcagggttccggtgatctcccccatcaccaaggagaaccagaggtacctcgagacgaagcgcaccaagatgggccatgtctacggctccgacctccccggcaacgtcccggaggaattcctcaacccggacgacatcgccggagaccaagacgaagacgacacccacaactga

SEQ ID NO: 84 - protein, 460 aa, Oryza sativa
ASFRTVGAKITQETGDFFVSDAEGDPDKPTDGFSSIDEAIGALHEGKFVIAVDDESGDNEGDLVMAATLADPESIAFMIRNGSGIISVGMKEEDLTRLMIPMMSPIAEIEDISAAASTVTVDARVGISTGVSAADRAKTIFTLASPDSKPTDLRRPGHIFPLKYRNGGVLKRAGHTEASVDLVALAGLRPVSVLSTVINPVDGSMAGMPVLKQMALEHDIPIVSIADLIRYRRKREKLVELIAVSRLPTKWGLFRAYCYQSKLDGTEHIAVAKGDIGDGEDVLVRVHSECLTGDILGSARCDCGNQLDLAMQLIDKAGRGVLVYLRGHEGRGIGLGQKLRAYNLQDDGHDTVQANVELGLAVDSREYGIGAQILRDMGVRTMRLMTNNPAKFVGLKGYGLAVVGRVPVISPITKENQRYLETKRTKMGHVYGSDLPGNVPEEFLNPDDIAGDQDEDDTHN

SEQ ID NO: 85 - DNA, 267 bp, Oryza sativa
  CDS (1)..(267)
ggaacaaaccctggcttcagagttggagagatcaggctctccaacagggatatttatttcggcacattattggggaacacaccagagggttcagggaggtatgtctggtcagatggttgcacttacgatggtgagtggaggagagggatgaggcatgggcaaggaaagacaatgtggccatctggagccacctacgagggtgagtactctggtggctacatttatggtgaaggcacatataccgggtctgacaacatcgtctacaag

SEQ ID NO: 86 - protein, 89 aa, Oryza sativa
GTNPGFRVGEIRLSNRDIYFGTLLGNTPEGSGRYVWSDGCTYDGEWRRGMRHGQGKTMWPSGATYEGEYSGGYIYGEGTYTGSDNIVYK

SEQ ID NO: 87 - DNA, 1227 bp, Oryza sativa
  CDS (1)..(1227)
ccacgcgtccggagaagcggccgctttttttttttgttttcccctccgactccgactccgatcgatctccaccccgaatccctcctcctcaccgccggcgagcttccggctgcggcggagatggccacacgttattggatcgtgtctcttcccgtgcagactcctggctccaccgccaattctctctgggcgcgcctccaggactccatctcgcgccactccttcgacacgccgctctaccggtttaacgtccccgatctccgcgtcggcacgctcgactccctcctcgccctcagcgacgatctcgtcaagtccaacgtcttcatcgagggggtctcgcacaagatccggaggcagatcgaggagctagagcgcgccgggggtgtcgagagtggggctctcaccgttgacggcgtccccgtcgacacctacctcaccaggtttgtgtgggatgagggcaaatacccaacgatgtcaccgctcaaggagattgccggcagcatccaatcacaggtctccaagattgaagatgacatgaaggttcgaggagcggaatacaataatgtaaggagccagcttaatgcgatcaacagaaagcaaaccggaagcttagcagttcgtgatctttccaatctggtaaaaccagaggatatggtcacatcagaacatctagtgacactccttgcagttgttcctcagtactctcaaaaggattggttgtcaagctatgagtcccttgacacatttgtggtaccgagatcgtctaaaaaactttatgaggacaatgagtatgctctctacacggtaacattgtttgctaaggttgttgacaactttaaggtccgtgcacgtgaaaaaggtttccaggttcgcgattttgagtatagttctgaagcacaggaaagtaggaaggaagagctggaaaagctaatgcaagaccaggaagcaatgagggcatcacttctgcaatggtgctatgccagctacagtgaggtattcagttcctggatgcacttctgtctggtgcgtgtctttgtagagagcattcttagatatggtcttcccccatcattcctgtctgctgttctagcaccttctcaaaagggtgaaaagaaagtaaggagcatcctgaggaactctgtgggcaatgtccatagtatttattggaaatctgaagacgatgttggtgtagctggtctgggaggcaaggcagtgtttttggagtaa

SEQ ID NO: 88 - protein, 408 aa, Oryza sativa
PRVRRSGRFFFLFSPPTPTPIDLHPESLLLTAGELPAAAEMATRYWIVSLPVQTPGSTANSLWARLQDSISRHSFDTPLYRFNVPDLRVGTLDSLLALSDDLVKSNVFIEGVSHKIRRQIEELERAGGVESGALTVDGVPVDTYLTRFVWDEGKYPTMSPLKEIAGSIQSQVSKIEDDMKVRGAEYNNVRSQLNAINRKQTGSLAVRDLSNLVKPEDMVTSEHLVTLLAVVPQYSQKDWLSSYESLDTFVVPRSSKKLYEDNEYALYTVTLFAKVVDNFKVRAREKGFQVRDFEYSSEAQESRKEELEKLMQDQEAMRASLLQWCYASYSEVFSSWMHFCLVRVFVESILRYGLPPSFLSAVLAPSQKGEKKVRSILRNSVGNVHSIYWKSEDDVGVAGLGGKAVFLE

SEQ ID NO: 89 - DNA, 1512 bp, Oryza sativa
  CDS (1)..(1512)
aagtatgctgagcgtgggcttcgttctcttgctgttgcaagacaggaagtacctgagaagtcgaaggagtctgctggtggaccatggcaattcgttggtctgctgcccctgtttgatcccccgaggcacgacagtgctgaaactatccggaaggctctccatcttggtgttaatgttaagatgatcactggtgaccagcttgctattggtaaggagactggtaggaggcttggaatgggtacaaacatgtatccttcatccgcattgctcggacaaaacaaggacgcttcacttgaggcacttcccgtggatgagctcattgagaaggctgatggttttgccggagtcttccctgagcacaaatatgagatcgtgaagaggttgcaagagaagaagcacatcgtcggtatgaccggagatggtgtcaatgatgcccctgctcttaagaaggccgacattggtattgctgttgctgatgcaatagatgctgcaagaagtgcttccgacattgtgctcactgagccaggtcttagtgtcattatcagcgctgtcctcactagcagatgcatcttccagaggatgaagaactataccatttatgcagtttccatcaccatccgtatagtgcttggatttttgcttattgctctgatctggaaatacgacttctcacccttcatggtccttatcattgccatcctgaatgacggtactatcatgacgatctcgaaggacagagttaagccttctcccttgccagacagctggaagctgaaggaaatcttcgctaccggtattgtgcttggaagctaccttgctctgatgaccgttattttcttctgggccatgcacaagacagactttttcacggacaaattcggtgtcagatcaatcaggaacagtgaacatgagatgatgtctgcactgtacctccaagtcagtattgtgagtcaggccctcatcttcgtcacccgttctcgcagctggtccttcatcgaacgccctggtcttctcttggtcactgcattcatgcttgcacaactggttgcgacattcctcgctgtctatgccaactggggctttgccaggatcaagggcattggctggggctgggctggcgttatctggctttacagcattgtgttctacttccctcttgacatcttcaagttcttcatccgctttgtgctgagtggaagggcctgggacaacctccttgagaacaagattgcattcaccaccaagaaggattacggtagggaggagagggaggcacaatgggccaccgcacaaagaacacttcacggccttcagccaccggaggtcgcctccaacacgctcttcaacgacaagagcagctaccgcgagctctctgagatcgctgagcaagccaagagacgagctgagatcgcgaggctgagagagctgaacactctcaagggccacgtcgaatcggtggtgaagctgaaggggctggacatcgacacgatccagcagaactacacagtgtga

SEQ ID NO: 90 - protein, 503 aa, Oryza sativa
KYAERGLRSLAVARQEVPEKSKESAGGPWQFVGLLPLFDPPRHDSAETIRKALHLGVNVKMITGDQLAIGKETGRRLGMGTNMYPSSALLGQNKDASLEALPVDELIEKADGFAGVFPEHKYEIVKRLQEKKHIVGMTGDGVNDAPALKKADIGIAVADAIDAARSASDIVLTEPGLSVIISAVLTSRCIFQRMKNYTIYAVSITIRIVLGFLLIALIWKYDFSPFMVLIIAILNDGTIMTISKDRVKPSPLPDSWKLKEIFATGIVLGSYLALMTVIFFWAMHKTDFFTDKFGVRSIRNSEHEMMSALYLQVSIVSQALIFVTRSRSWSFIERPGLLLVTAFMLAQLVATFLAVYANWGFARIKGIGWGWAGVIWLYSIVFYFPLDIFKFFIRFVLSGRAWDNLLENKIAFTTKKDYGREEREAQWATAQRTLHGLQPPEVASNTLFNDKSSYRELSEIAEQAKRRAEIARLRELNTLKGHVESVVKLKGLDIDTIQQNYTV

SEQ ID NO: 91 - DNA, 612 bp, Oryza sativa
  CDS (1)..(612)
atggccatggccacgcaagcctccgccgccaagtgccacctcctcgccgcctgggcaccggcgaagccgcgctcatccaccctctccatgcccacctcgagggcacccacctccctcagagcggcggcggaggatcagcccgccgcggcggcgacggaggagaagaagccagcccccgcggggttcgtgccgccgcagctggaccccaacacgccgtccccgatcttcggcgggagcacggggggactcctccggaaggcgcaggtggaggagttctacgtcatcacatggacgtcgcccaaggagcaggtgttcgagatgcccacgggcggcgccgccatcatgcgcgagggccccaacctgctgaagctggccaggaaggagcagtgcctggccctgggcaccaggctccgctccaagtacaagatcaactaccagttctaccgcgtcttccccaatggcgaggtgcagtacctccaccccaaggacggcgtctacccggagaaggtcaacgccggcaggcagggcgtcggccagaacttccgcagcatcggcaagaacgtcagccccatcgaggtcaagttcaccggcaagaacgtcttcgacatctag

SEQ ID NO: 92 - protein, 203 aa, Oryza sativa
MAMATQASAAKCHLLAAWAPAKPRSSTLSMPTSRAPTSLRAAAEDQPAAAATEEKKPAPAGFVPPQLDPNTPSPIFGGSTGGLLRKAQVEEFYVITWTSPKEQVFEMPTGGAAIMREGPNLLKLARKEQCLALGTRLRSKYKINYQFYRVFPNGEVQYLHPKDGVYPEKVNAGRQGVGQNFRSIGKNVSPIEVKFTGKNVFDI

SEQ ID NO: 93 - DNA, 901 bp, Oryza sativa
  CDS (1)..(900)
gcgccaggggcgcgagtgttcctggcacggccgctcctccgccgctcgccgcggggcgtcgcctgcgcccttcgccggaggccctccaagtacaagaataaaatccagaatgaggaggttgtagtagaggatgatattggcggtggtggtgaagacgatgacgacgcgctggaagcactttttaagcagttggaagaagatctcaagaatgatgatttgtctgttgaggatgatgacgatggaatttcagaagaagatatggcaagatttgagcaggagttggcagaggcaatcggggatattgctgatgctgatgaatctggagagggttcgtcattaggctctgaggcttatgggaatgatgaaaaaacggatgaaatcaaacggccagagctgaaaaactggcaacttaagaggctggctcgtgctctcaaaataggtcgccgtaaaactagtataaagaatcttgcaggggaactaggcctggataggactttggtcattgaattgctccgaaatccacctccaaaacttctattcatgtctgattctttgcctgatgaagacccttctaaacctgaaatcaaggaaatagagccctctccagtagttgataacgctgatgtcactgaaaccaagccacagacggaacttcctgttcatgtcatgtgcgcagaatggtcttcacagaaaagattaaaaaaggtgcaactggagacattagaaagagtctactcccgaaccaaacgccctacaaatacaatgatcagcagcatagttcaagtgacaagccttccacggaagaccattgttaagtggtttgaggatagaagggaacaggatggggtacctgaccatcgagttgcattcaagagatccctatctgagaccatagctagtt

SEQ ID NO: 94 - protein, 300 aa, Oryza sativa
APGARVFLARPLLRRSPRGVACALRRRPSKYKNKIQNEEVVVEDDIGGGGEDDDDALEALFKQLEEDLKNDDLSVEDDDDGISEEDMARFEQELAEAIGDIADADESGEGSSLGSEAYGNDEKTDEIKRPELKNWQLKRLARALKIGRRKTSIKNLAGELGLDRTLVIELLRNPPPKLLFMSDSLPDEDPSKPEIKEIEPSPVVDNADVTETKPQTELPVHVMCAEWSSQKRLKKVQLETLERVYSRTKRPTNTMISSIVQVTSLPRKTIVKWFEDRREQDGVPDHRVAFKRSLSETIAS

SEQ ID NO: 95 - DNA, 799 bp, Oryza sativa
  CDS (1)..(798)
gccccacgccgcccctccaccttcctcaacgccgtcgcgctcggcaacgtcggggcgggcaagtcggccgtgctgaacagcctcatcggccaccccgtgctgccgacgggggagaacggggcgacgagggcgccaattgtggtggacctgcagagggacccgggcctcagcagcaagtccatcgtgctgcaaatcgacagcaagtcgcagcgggtgtccgcaagttcgctgcggcattcgctgcaggacaggctcagcaagggggcgtccagcggatccagtaggggccgtgtagaggggatcaatctcaagctgcggacgagtacagctcccccactaaagctggttgatttacctgggatagaccagcgagctgttgacgatccaatgattaatgaatatgctgggcacaatgatgcaatactgctagttgtgatacctgcaatgcaagcagctgatgttgcgtcatctcgagctcttaggctggccaaggatattgatgcagatggcaccagaactgtaggtgtgataagtaaagttgatcaagcagaaggagatgcaaaaactatagcttgtgttcaggcccttctgttgaataagggcccaaaaaaccttccagatatcgagtgggttgctctgataggacaatcagttgcaattgcgtcagctcaagcagcaggttctgaaaactcactagaaacagcatggaatgctgaagctgaaaccctcagatccatcttaactggagctccaaaaagtaaactaggtagaatagctctggttgacaccattgctaagc

SEQ ID NO: 96 - protein, 266 aa, Oryza sativa
APRRPSTFLNAVALGNVGAGKSAVLNSLIGHPVLPTGENGATRAPIVVDLQRDPGLSSKSIVLQIDSKSQRVSASSLRHSLQDRLSKGASSGSSRGRVEGINLKLRTSTAPPLKLVDLPGIDQRAVDDPMINEYAGHNDAILLVVIPAMQAADVASSRALRLAKDIDADGTRTVGVISKVDQAEGDAKTIACVQALLLNKGPKNLPDIEWVALIGQSVAIASAQAAGSENSLETAWNAEAETLRSILTGAPKSKLGRIALVDTIAK

SEQ ID NO: 97 - DNA, 1429 bp, Oryza sativa
  CDS (1)..(1428)
atgggggcccttttgagctcccccaacagcaagaaccagccatgggagcatggtgaagcttcaaaggcagattcctccaagaagctgcggatgtcggcgccgcctctgtccggtggctacgaccaccccgggctgatcccggggctcccggatgagatctcgctgcagatcctcgcaaggatgccccggatgggttatctgaatgcaaagatggtttcgaggagctggaaggctgcgatcactggcgtggagctgtaccgggtgaggaaggagctgggtgtgagtgaggaatggctgtacatgcttaccaagtcagatgatgggaagctagtgtggaatgcattcgatccggtttgtggccaatggcagaggctgccactgatgccggggatcagccatggaggagaatgcaagaggggcatccctgggttgtggttaggggatttgttgagcgccggcatcagggtctctgatgttattagaggctggcttggccaaagggattcattggataggcttccgttctgcggttgtgcaattgggacagtcaacgggtgcatctatgttttaggtggattctctagaggctcggcgatgaaatgtgtatggaggtatgatccttttgtcaatgcgtggcaggaggttagctcgatgagcaccgggcgcgcattctgcaaggctagcctgctgaacaacaagctgtatgttgttggtggtgtcagcaaaggcaagaacgggttagctccgctccaatccgccgaggtgtttgacccaaggacaggaatttgggtgggaggggccctgacactctccgtctcgaaagggccaagctctaccagctgcctcttggttgagctggtgaagcccattgcgacaggaatgacctctttgggaggcaagctttatgttcttcaaagtctgtattccgggccattctttgttgatgttggtggggagatctttgatccggagacaaattcatgggcggaaatgcctgtaggaatgggcgagggctggccagcgaggcaggctggtacgaagttaagtgctgtcatagatggggacttgtatgctttggagccatcaacttcttttgatagaggtaagatcaagatttatgatcctcaggaggatgcttggaaggttgccattggccaggtaccagtgggtgactttgcagagtcggaatgtccatacttacttgcaggatttcttggcaagctcaatttgatcatcaaagatgtagatagcaagatcaatataatgcaaaccgatgttctgaagcctgtggagttgtcagcccctggaaatggtccaacatgccaaaatcaacaacttttttcagaacaggaaactaatttgtggaaagtcatcgtgtcgaaaaatcttgcagccgctgaattagtcagttgtcaggtgctcaacatat

SEQ ID NO: 98 - protein, 476 aa, Oryza sativa
MGALLSSPNSKNQPWEHGEASKADSSKKLRMSAPPLSGGYDHPGLIPGLPDEISLQILARMPRMGYLNAKMVSRSWKAAITGVELYRVRKELGVSEEWLYMLTKSDDGKLVWNAFDPVCGQWQRLPLMPGISHGGECKRGIPGLWLGDLLSAGIRVSDVIRGWLGQRDSLDRLPFCGCAIGTVNGCIYVLGGFSRGSAMKCVWRYDPFVNAWQEVSSMSTGRAFCKASLLNNKLYVVGGVSKGKNGLAPLQSAEVFDPRTGIWVGGALTLSVSKGPSSTSCLLVELVKPIATGMTSLGGKLYVLQSLYSGPFFVDVGGEIFDPETNSWAEMPVGMGEGWPARQAGTKLSAVIDGDLYALEPSTSFDRGKIKIYDPQEDAWKVAIGQVPVGDFAESECPYLLAGFLGKLNLIIKDVDSKINIMQTDVLKPVELSAPGNGPTCQNQQLFSEQETNLWKVIVSKNLAAAELVSCQVLNI

SEQ ID NO: 99 - DNA, 1140 bp, Oryza sativa
  CDS (1)..(1140)
tcatccttcctttggggttatctggtgtcaccaataattggtggagcactggtcgactactatggcggaaagcgagttatggcttatggcgtggctctatggtccttggctacattcctctccccttgggcagctgctcgctctctctggttgttcctctcaactagagttctgctgggtatggcagaaggggtggcactcccaagtatgaacaacatggtgttgaggtggtttcctcgcacagagcgatcaagtgctgtcgggattgcaatggctggttttcagcttggcaataccattggtttacttctttcccctatcatcatgtcacgagctggaatttttggaccatttgtgatatttggattatttggatttctatgggtgttggtgtggatatctgctatatcagggactccaggtgaaaatgcacaaatatcagcacatgaactagattatataaccaggggtcagaaattggtaaaaactcaatctggaggtgaaagattacgaaaggtccctcctttcagcaagctactctctaaatggccaacatgggctttaatttctgcaaatgctatgcatagttggggttattttgtcattctttcatggatgccagtgtatttcaaaacaatatatcatgttaatctgagagaagctgcatggtttagtgcactcccctgggtcatgatggcagttttaggctatgttgctggtgttgtatcagacaggcttatccaaaatggtacaagcatcactttgactcggaagataatgcagacaattggctttgtgggtcctggtgtggctcttcttggactaaatgcagcaaagagtccagtcatcgcttctgcttggcttactatcgctgtaggtttgaagtcctttggtcactcaggttttctagtaaatcttcaggagattgctccacaatatgctggagtgctacatggaatgtcaaatacagctggaacatttgctgccattttaggaactgttggagcaggtttctttgtcgatcggatgggttctttccgtggatttttaatattaacatctcttctatacttcagtagcacactgttctgggatatatttgctactggagagcgtgttgattttgatggcactggctag

SEQ ID NO: 100 - protein, 379 aa, Oryza sativa
SSFLWGYLVSPIIGGALVDYYGGKRVMAYGVALWSLATFLSPWAAARSLWLFLSTRVLLGMAEGVALPSMNNMVLRWFPRTERSSAVGIAMAGFQLGNTIGLLLSPIIMSRAGIFGPFVIFGLFGFLWVLVWISAISGTPGENAQISAHELDYITRGQKLVKTQSGGERLRKVPPFSKLLSKWPTWALISANAMHSWGYFVILSWMPVYFKTIYHVNLREAAWFSALPWVMMAVLGYVAGVVSDRLIQNGTSITLTRKIMQTIGFVGPGVALLGLNAAKSPVIASAWLTIAVGLKSFGHSGFLVNLQEIAPQYAGVLHGMSNTAGTFAAILGTVGAGFFVDRMGSFRGFLILTSLLYFSSTLFWDIFATGERVDFDGTG

SEQ ID NO: 101 - DNA, 2727 bp, Oryza sativa
  CDS (1)..(2727)
ataaaaagacttcaccttctgctcacagtgaaggaatctgctatggatgttcctacaaacctggatgctagaaggcggatatcattctttgctaattctcttttcatggacatgccaagtgctccaaaagtccggcacatgttgcccttctctgtcttgactccttactacaaagaagatgtccttttctcttcccaagcattagaagaccagaatgaagatggggtttctattcttttttacttgcaaaaaatctatccagatgaatggaaacatttccttcaaagggtggattgcaatactgaagaggaactccgtgagacagagcagttggaagatgagcttcgcctttgggcatcatacaggggccaaactttgacgagaactgtcagagggatgatgtactacagacaagctttggtgcttcaggcttttcttgatatggctagagatgaagatcttagggaaggcttcagagcagctgacctcttaaatgatgaatcaccattactgactcaatgcaaagctatagctgacatgaagtttacatacgttgtatcatgccaacaatacggtatccagaaacgttctggtgatcaccgtgcacaagatattcttagactgatgacaacttatccatcacttcgggttgcctatattgatgaagttgaagagccaagcaaagacaggaacaagaagatagaaaaggtttactactcagcgttggtgaaggcagctgtaaccaagcctgacgatcctggtcagaaacttgatcaggacatatacagaataaagctaccaggtaatgcaatgctaggtgaaggaaagccagaaaatcagaaccatgcgataatatttactcgaggtgaaggccttcaaactatagacatgaatcaggaacattacatggaggagactttgaaaatgagaaatctgctgcaagagtttctgaagaaacatgatggtgtgaggtatccatcaatacttggtgtgagagagcacatattcactggcagtgtttcttctcttgcgtggttcatgtcaaatcaagagacaagttttgtcactattggacaacgggtacttgccaatcctttgagagttcgatttcattatggacatcctgatatttttgatcgacttttccacctcacgaggggtggtgtaagcaaagcatccaagattatcaatcttagtgaggacatatttgctggattcaactcaacactgcgtgaaggaaatgttacgcatcatgaatacatgcaagttggcaaggggagagatgtgggtctcaatcaaatctcactatttgaggcaaaaatagctaatggtaatggagagcagacactgagccgtgacgtctaccgacttggacatcgttttgatttcttcagaatgttgtcctgctactacaccactattggtttttacttcagcactatgatgacagtgtggacagtgtatgtattcctctatggacgtctctatcttgtcctcagtggtcttgatgaagccttggctactggaaaaaggtttatacacaatgaacctctccaggttgctcttgcttcacagtcttttgtgcagcttgggtttttgatggcgttgcctatgatgatggaaattggtctggagagaggatttagaaccgcattgagcgactttgtactgatgcagctgcagttagcatctgttttctttacattctctctcgggaccaaaactcactactatggaacaacgctgctccatggaggagccgagtatagagctactgggcgtggatttgtggtgttccatgccaaatttgcggagaactatcgactatactcacgcagccattttgtcaagggtattgagttgctgattttgctaattgtgtatgaaatctttgggcaatcatatcgaggagctatcgcgtacatcttcattacattttcgatgtggtttatggttgtaacctggctctttgcaccattcctatttaatccttctgggttcgagtggcagaagattgtggatgattggactgattggaataagtggatcagcaaccgtggtggtattggtgtaccaccggagaaaagttgggagtcatggtgggagaaagagcaggagcctataaaatattctgggaagcgtggaattgttctcgaaatagtgcttgcattgcgcttctttatctaccaatatggtcttgtttatcacttgaacataaccaaacacacaaagagtgtcctggtctattgcctgtcatgggttgtcatctttgtaattctgcttgtgatgaagaccgtgtcagttgggaggcggaaattcagcgcggacttccaacttgtgttccggttgattaaggggttgatatttataacatttatctccatcattataatcttgatagcaatccctcatatgacagtccaggacatctttgtttgcattcttgccttcatgccaactggctggggtctgctgttggttgcgcaagctatcaagccagtaattgtgcgcatcgggttgtggggatcgatcaaggcgcttgcgaggggatatgagatcatcatggggctcctgctcttcaccccgatcgcgttcctcgcttggttcccgtttgtatccgagttccagaccagaatgctcttcaaccaggccttcagcagaggtctgcagatctcgcgaatccttggcggccacaagaaagaccgagctacacggaacaaggagtag

SEQ ID NO: 102 - protein, 908 aa, Oryza sativa
IKRLHLLLTVKESAMDVPTNLDARRRISFFANSLFMDMPSAPKVRHMLPFSVLTPYYKEDVLFSSQALEDQNEDGVSILFYLQKIYPDEWKHFLQRVDCNTEEELRETEQLEDELRLWASYRGQTLTRTVRGMMYYRQALVLQAFLDMARDEDLREGFRAADLLNDESPLLTQCKAIADMKFTYVVSCQQYGIQKRSGDHRAQDILRLMTTYPSLRVAYIDEVEEPSKDRNKKIEKVYYSALVKAAVTKPDDPGQKLDQDIYRIKLPGNAMLGEGKPENQNHAIIFTRGEGLQTIDMNQEHYMEETLKMRNLLQEFLKKHDGVRYPSILGVREHIFTGSVSSLAWFMSNQETSFVTIGQRVLANPLRVRFHYGHPDIFDRLFHLTRGGVSKASKIINLSEDIFAGFNSTLREGNVTHHEYMQVGKGRDVGLNQISLFEAKIANGNGEQTLSRDVYRLGHRFDFFRMLSCYYTTIGFYFSTMMTVWTVYVFLYGRLYLVLSGLDEALATGKRFIHNEPLQVALASQSFVQLGFLMALPMMMEIGLERGFRTALSDFVLMQLQLASVFFTFSLGTKTHYYGTTLLHGGAEYRATGRGFVVFHAKFAENYRLYSRSHFVKGIELLILLIVYEIFGQSYRGAIAYIFITFSMWFMVVTWLFAPFLFNPSGFEWQKIVDDWTDWNKWISNRGGIGVPPEKSWESWWEKEQEPIKYSGKRGIVLEIVLALRFFIYQYGLVYHLNITKHTKSVLVYCLSWVVIFVILLVMKTVSVGRRKFSADFQLVFRLIKGLIFITFISIIIILIAIPHMTVQDIFVCILAFMPTGWGLLLVAQAIKPVIVRIGLWGSIKALARGYEIIMGLLLFTPIAFLAWFPFVSEFQTRMLFNQAFSRGLQISRILGGHKKDRATRNKE

SEQ ID NO: 103 - DNA, 975 bp, Oryza sativa
  CDS (1)..(975)
cacgcgtccgggtccgggtcggtgcgggagcggttcgaggccatgatccgccgcgtgcagggggaggtgtgcgcggcgctggaggaggccgacgggagcggcgcccggttcgtggaggacgtgtggtcgcgccccggcggcggcgggggcatcagccgggtgctccaggacggccgcgtgttcgagaaggccggggtcaacgtctccgtcgtgtacggcgtcatgccccccgacgcgtaccgcgccgccaagggggaggccggcaagaacggcgcggcggcagatggccccaaggctgggcccgtgcccttctttgccgctggcattagctcggttcttcaccccaagaacccatttgctccaacattgcattttaactaccgctattttgagacagatgcaccgaaagatgctcctggtgcaccaaggcaatggtggtttggaggtggtactgatttgactccttcatatatcattgaagaggatgtgaagcattttcattctgttcaaaaacaagcgtgtgataagtttgacccaagtttttacccgagattcaaaaaatggtgtgatgattatttctatattaagcaccgtaatgagcgtcgggggcttggtggaatattttttgatgatcttaatgactatgatcaagaaatgcttctcaactttgctacagaatgtgcggattctgttgttcctgcatacataccaatcattgaacgccggaaggacactccatttactgaggaacacaaggcatggcaacaactgaggagaggtcgctatgtggagttcaaccttgtatatgatcgcggtaccacatttggcctcaagactggggggaggattgagagtattctggtttctcttccactgactgcacgatggcagtattatcatacacctgaagagggaactgaagaacggaaacttcttgacgcgtgcataaacccaaaggaatggctcgatctctga

SEQ ID NO: 104 - protein, 324 aa, Oryza sativa
HASGSGSVRERFEAMIRRVQGEVCAALEEADGSGARFVEDVWSRPGGGGGISRVLQDGRVFEKAGVNVSVVYGVMPPDAYRAAKGEAGKNGAAADGPKAGPVPFFAAGISSVLHPKNPFAPTLHFNYRYFETDAPKDAPGAPRQWWFGGGTDLTPSYIIEEDVKHFHSVQKQACDKFDPSFYPRFKKWCDDYFYIKHRNERRGLGGIFFDDLNDYDQEMLLNFATECADSVVPAYIPIIERRKDTPFTEEHKAWQQLRRGRYVEFNLVYDRGTTFGLKTGGRIESILVSLPLTARWQYYHTPEEGTEERKLLDACINPKEWLDL

SEQ ID NO: 105 - DNA, 882 bp, Oryza sativa
  CDS (1)..(882)
atggaggtggggttcctggggctgggcatcatggggaaggcaatggcggccaacctcctccgccacggcttccgcgtcaccgtctggaaccggactctctccaagtgccaggagctcgtcgcgctgggcgccgccgtgggggagacgccggcggccgtcgtcgccaagtgcagatacaccatcgccatgctctccgaccccagcgccgcgctatctgttgtattcgacaaggacggcgtgctcgagcagattggggaagggaagggttatgtggacatgtccactgttgatgccgccacttcttgcaagataagcgaggctataaaacaaaaaggtggggcttttgttgaagctccagtttcaggaagcaaaaagccagctgaagatggccaattggtcattcttgctgcaggggacaaggtattgtatgatgatatggtccctgcatttgatgtacttgggaaaaagtcgttctttttgggagagattggaaatggagcaaagatgaaactggtggtcaacatgatcatgggaagtatgatgaatgctttgtctgagggactctctctggctgataacagtggtttgagcccccagacacttcttgatgtcctggaccttggcgccatcgcgaatccaatgttcaagctgaaagggccctcgatgctgcaaggcagctacaaccctgcatttcccctgaaacaccagcagaaggatatgaggttggcacttgccctaggagacgagaacgctgtctccatgccagtggcagctgcttccaacgaggcgttcaagaaagcaagaagcttgggactaggggacctggatttctcagcggtttacgaggtactgaagggcgcaggtggctcaggcaaggcgtga

SEQ ID NO: 106 - protein, 293 aa, Oryza sativa
MEVGFLGLGIMGKAMAANLLRHGFRVTVWNRTLSKCQELVALGAAVGETPAAVVAKCRYTIAMLSDPSAALSVVFDKDGVLEQIGEGKGYVDMSTVDAATSCKISEAIKQKGGAFVEAPVSGSKKPAEDGQLVILAAGDKVLYDDMVPAFDVLGKKSFFLGEIGNGAKMKLVVNMIMGSMMNALSEGLSLADNSGLSPQTLLDVLDLGAIANPMFKLKGPSMLQGSYNPAFPLKHQQKDMRLALALGDENAVSMPVAAASNEAFKKARSLGLGDLDFSAVYEVLKGAGGSGKA

SEQ ID NO: 107 - DNA, 1032 bp, Oryza sativa
  CDS (1)..(1032)
gcttctgaggaatcaacaacagccaacttagtggggcagatcacaaccacctgtacagatgatatttctgtgaacagatcagcagaaaattcttcacagaagaacattccattggatggagtatctgcacagtccattaagccatctgcaagtagtaggtctgaaccagtaggtcttggtggaggtttgcagcctaagaggcggagcagaacagcaaagccacctgggagtagcagtgatactggcgaagtcgtcaattcctctcgcatcagcaatagccaaaatgctgtttcaatgggccagcaggttctgcaagcccttgcttctcaaaatactaatgtaaacagaagccatgttacggattctccacttccatccactacttctcagttttctggtggaatgcctccgagaagacagggtggtgaaggacaagttgattttggcagtatgatatccagtgtgctaaacaacccagcttttggcaatctgttgtccaatgtagcagagcaaacaggcatgggttccgcaggtgatttgagaaacatggtggaagagtgtgcacagagccctgcaataatggatactatgagtaatttagtccaaaatgtggatgggtcaggaagaggtcaaggtggcattgacttgtctagaatgatgcagcaaatgatgcctgttgtatcccaagttcttggtggagctggggctcgtcctgctggtacaaatagtggacaatccagattgcagcctcggcgcagtgacatgagagtggatgatgcttcagattatggaaattctcagattgatctacaccaagctcgtgaacacattgagcaacatgactcccccagggatatcttcggtgcggtcctcgaaactgctgcacaggcttatggtgaagatgagagtattgaggacatgcttgaagagcttgtcagtgacccagaacttacagatgactacctgaaacttctgctccaacaagttcgccagaggatacagtcggcatctcaatccgggaaccagtcttga

SEQ ID NO: 108 - protein, 343 aa, Oryza sativa
ASEESTTANLVGQITTTCTDDISVNRSAENSSQKNIPLDGVSAQSIKPSASSRSEPVGLGGGLQPKRRSRTAKPPGSSSDTGEVVNSSRISNSQNAVSMGQQVLQALASQNTNVNRSHVTDSPLPSTTSQFSGGMPPRRQGGEGQVDFGSMISSVLNNPAFGNLLSNVAEQTGMGSAGDLRNMVEECAQSPAIMDTMSNLVQNVDGSGRGQGGIDLSRMMQQMMPVVSQVLGGAGARPAGTNSGQSRLQPRRSDMRVDDASDYGNSQIDLHQAREHIEQHDSPRDIFGAVLETAAQAYGEDESIEDMLEELVSDPELTDDYLKLLLQQVRQRIQSASQSGNQS

SEQ ID NO: 109 - DNA, 447 bp, Oryza sativa
  CDS (1)..(447)
atgggggggaaggagctgagcgaggagcaggtggcgtcgatgcgggaggcgttctccctcttcgacaccgacggcgacggccggatcgcgccgtcggagctcggcgtcctgatgcgctccctcggcgggaaccccacccaggcgcagctccgcgacatcgccgcgcaggagaagctcaccgcgcccttcgacttcccgcgcttcctcgacctcatgcgcgcccacctccgccccgagcccttcgaccgcccgctccgcgacgccttccgcgtcctcgacaaggacgcctccggcaccgtctccgtcgccgatctccgccacgtcctcacctccatcggcgagaagctcgagccccacgagttcgacgagtggatccgcgaggtcgacgtcgcccccgacggcaccatccgctacgacgacttcatccgccgcatcgtcgccaaataa

SEQ ID NO: 110 - protein, 148 aa, Oryza sativa
MGGKELSEEQVASMREAFSLFDTDGDGRIAPSELGVLMRSLGGNPTQAQLRDIAAQEKLTAPFDFPRFLDLMRAHLRPEPFDRPLRDAFRVLDKDASGTVSVADLRHVLTSIGEKLEPHEFDEWIREVDVAPDGTIRYDDFIRRIVAK

SEQ ID NO: 111 - DNA, 1692 bp, Oryza sativa
  CDS (1)..(1692)
  misc_feature (23)..(23): Xaa at amino acid position 23 stands for Arg, or Lys.
  misc_feature (56)..(56): Xaa at amino acid position 56 stands for Gln, or His.
  misc_feature (57)..(57): Xaa at amino acid position 57 stands for Leu.
  misc_feature (68)..(69): r is a or g
  misc_feature (104)..(104): Xaa at amino acid position 104 stands for Trp, or Leu.
  misc_feature (126)..(126): Xaa at amino acid position 126 stands for Pro, or Leu.
  misc_feature (168)..(168): m is a or c
  misc_feature (169)..(169): y is c or t
  misc_feature (172)..(172): s is c or g
  misc_feature (311)..(311): k is g or t
  misc_feature (377)..(377): y is c or t
atggcctccgccgccgtcatcccgtcgtccgcgcccggcgccgccgccgcaggtgcggccgcggttarragcgctgggtgggtggtggacgagcgggacggcttcatttcatggctgcgcggaaagttcgcggcggccaacgccatcatcgacctgctgctgctccamctycgstccgtcggcgagcccggggagttcgagcacgtcgccgccgcggtgcagcagcggcgccaccactgggcgcccgtgatccacatgcagcagttcttccccgtcggcgacgtcgcgtacgcgctccagcaggccgggtkgcgccgccgcgcgccgccgcaccaccagcagcagggccccggcgcctcgccgtccccgccgccccytcccccgcgcggccgcccctcgttctcggcgtcccactcgcaccatcgccacggtggtcaccatcatcgctccgattcggtgcgcggcggcggcactggtgcgacggctggatccgataaagatggacgtgaagttcataacaaggaagagaaaggaatgaaggaagcagagaatgtggttgaagctaaaagctcacagttggagtctcttgtttctcatgaaggtgaaaaaactcctaggccgcaagctgttgctgaaggaagcagtaaagtggttccaactcctgtggagtatacggtcaatgacattattgatggcaagacggttaatgctgttgaagggcttaaggtttatgaagggttggtaaatgagaatgagaaaaacaagattctctctttacttaatgaaacaaaagcttcttttcgtcgaggagggcttgaagctgggcagactgtaataattggaaaaagaccaatgaagggtcatgggagggaaattattcagctgggcattcctatcgttgaaggccctcctgaagatgactatccaagagagacaaaagtggaggctgttcctggattgctgcatgatctgtttgaccgcttgtgtcagaaggaaattataccaacaaaaccagattattgtgttattgattactacaatgagggggattattctcaccctcaccaatcccctccttggtatggtagacccttttgtacattctgcctgacagattgtgacatggtgttcggccgagttatttcaggagaacgaggtgatcatagaggtcctctgaagctccttctctcgacagggtctcttctggtgttgcatgggaagagtgctgatgttgctaagcgagctattcctgctgcatgtaagcagcggatcctactaagcttcgggaagtctttatcgagaaaacaagtaccatctgaaagtgtttcacggtttactaccccgttgacaccacctcctatgccctggggtcctccaaggccggctaacatggcgcgtcattcttcaagccctaaacactttggatatgccccaaacagtggcgtacttccagcgccggccattggagcgcatcacattcctccatcagatggaatgcagccactctttgtagcacctgctccagttgctgctgcagccatgcctttcccatcacctgttcctttgccaaacttaaccaacagcttggatggcagaagctgctccaaggtctgctccacaacgactcccagttcctggcacgggggtcttccttcctcctggatcgggtcacgcactgcctcatcagatgat

SEQ ID NO: 112 - protein, 564 aa, Oryza sativa
  misc_feature (23)..(23): The 'Xaa' at location 23 stands for Arg, or Lys.
  misc_feature (56)..(56): The 'Xaa' at location 56 stands for Gln, or His.
  misc_feature (57)..(57): The 'Xaa' at location 57 stands for Leu.
  misc_feature (104)..(104): The 'Xaa' at location 104 stands for Trp, or Leu.
  misc_feature (126)..(126): The 'Xaa' at location 126 stands for Pro, or Leu.
MASAAVIPSSAPGAAAAGAAAVXSAGWVVDERDGFISWLRGKFAAANAIIDLLLLXXRSVGEPGEFEHVAAAVQQRRHHWAPVIHMQQFFPVGDVAYALQQAGXRRRAPPHHQQQGPGASPSPPPXPPRGRPSFSASHSHHRHGGHHHRSDSVRGGGTGATAGSDKDGREVHNKEEKGMKEAENVVEAKSSQLESLVSHEGEKTPRPQAVAEGSSKVVPTPVEYTVNDIIDGKTVNAVEGLKVYEGLVNENEKNKILSLLNETKASFRRGGLEAGQTVIIGKRPMKGHGREIIQLGIPIVEGPPEDDYPRETKVEAVPGLLHDLFDRLCQKEIIPTKPDYCVIDYYNEGDYSHPHQSPPWYGRPFCTFCLTDCDMVFGRVISGERGDHRGPLKLLLSTGSLLVLHGKSADVAKRAIPAACKQRILLSFGKSLSRKQVPSESVSRFTTPLTPPPMPWGPPRPANMARHSSSPKHFGYAPNSGVLPAPAIGAHHIPPSDGMQPLFVAPAPVAAAAMPFPSPVPLPNLTNSLDGRSCSKVCSTTTPSSWHGGLPSSWIGSRTASSDD

SEQ ID NO: 113 - DNA, 858 bp, Oryza sativa
  CDS (1)..(858)
atggagggcggcggcgaggtgggctggtacgtgctcggcccgaaccaggagcacgtcggcccctacgcgctctccgagctgcgagaacattttgctaatgggtacatcagtgagagctcaatgctctgggcagaagggaggagtgaatggatgccattgtcgtcgattcctgacctacttgcggtggtcacaaaaaaggatcaacctgatgaaggaattgaagatgatttcgataaatttcaaaaggaggttatagaagctgaggcagaggtggaagcctcgacagacaaggctgcagataacgacataaaccaagaacatggggccgatgatcctgatgaccggccagcaaccccaccagatggcgaggacgaatttactgatgatgatggtactgtttacaagtgggatcgtgtcctgagggcatgggttcctcaagatgacctagaaggcaaaaatgacaactatgaagttgaagacatgacttttgcacatgaggaagaagttttccaagcaccagatattgctggttcaaccacattagaagaaaacaatgtttctgcggaaattgaaatcaaagaaccaccaaaggtagaaaagagagcacataagaagcggaagtcttctgaaaagccagccgataaaaaggaagcttacaaacctccagatagttgggttgatctcaaagttaacacacatgtctacgttactggtttgcctgatgatgtcacagctgaggagattgtggaggtattttccaaatgtggaattataaaggaggacccagagacaagaaaaccccgagtaaaaatctatactgacagagaaacaggcagaaagaaaggtgatgcgctagtg

SEQ ID NO: 114 - protein, 286 aa, Oryza sativa
MEGGGEVGWYVLGPNQEHVGPYALSELREHFANGYISESSMLWAEGRSEWMPLSSIPDLLAVVTKKDQPDEGIEDDFDKFQKEVIEAEAEVEASTDKAADNDINQEHGADDPDDRPATPPDGEDEFTDDDGTVYKWDRVLRAWVPQDDLEGKNDNYEVEDMTFAHEEEVFQAPDIAGSTTLEENNVSAEIEIKEPPKVEKRAHKKRKSSEKPADKKEAYKPPDSWVDLKVNTHVYVTGLPDDVTAEEIVEVFSKCGIIKEDPETRKPRVKIYTDRETGRKKGDALV

SEQ ID NO: 115 - DNA, 1251 bp, Oryza sativa
  CDS (1)..(1251)
atggcgaggcgctctccttgcctcgccgtcgccatgctcctgcttggggcgttggcggtggcgagcgccttcattgatgaagcggcggctgctggccgggggctcggccatggcgcccgcttcatgagcaagcagggtcgtgtgacatacgagaagctgccggagccggagccgaagccaaagccaaagcctcatcctaaacccacgccaaaacctgagcccaagccagagccggagccaaaaccagtacctgagcctgagcctaaaccggaaccaaagccagaaccaaaacctgagcctaagcctgaacctaaaccatacccagagccaaaaccggagccgaagccagagccaaaacctgagccggagcctaaacctgagcctaagccagaaccaaaaccagaaccaaagccgtacccagagccgaagccagagccaaaaccggaaccgaagccggaaccaaaaccggagcccaaaccaaagccagagcccaaaccacacccagaaccaaagcctgatccgaaacctgagcctaagccacacccagagcctgagcctaagcctgaacctaagcctgagcccaagccacaccctgagcctgaaccaaagcctgagcctaagcctgagccaaagccagaaccaaagccggagccaaaacctgaaccaaaaccaaagccaaagccagagccaaagccaaagcctgagcccaagccataccctgagcctaagcctaagcctgaaccaaagcctgagcctaagcctgagccaaagccagaaccaaagccggagccaaaacctgaaccaaaaccagagccaaagccagagccaaagccaaagcctgagcccaagccacaccctaagcctgagcctaagcctgagcccaagccagaaccaaagccagagccaaaacctgaaccaaaaccagagccaaaaccagagcctgaaccgaagcctgagccaaagcctgaaccaaaaccagagcccaaaccatatccagagcctaaaccggatcccaaaccagaacccaaaccacacccagaaccaaagccagagcccaagccacagccggagccaaaaccagagccgaagcctgaacctaaaccagagcctaagcccgaaccaaaaccggagcctaaaccatacccagagccaaagcctgaaccgaaacctaagcctaagcctgagccaaaacctgaagcacctccgaagaagcacaagccgccgcacataccgccagcgaccgaccagtga

SEQ ID NO: 116 - protein, 416 aa, Oryza sativa
MARRSPCLAVAMLLLGALAVASAFIDEAAAAGRGLGHGARFMSKQGRVTYEKLPEPEPKPKPKPHPKPTPKPEPKPEPEPKPVPEPEPKPEPKPEPKPEPKPEPKPYPEPKPEPKPEPKPEPEPKPEPKPEPKPEPKPYPEPKPEPKPEPKPEPKPEPKPKPEPKPHPEPKPDPKPEPKPHPEPEPKPEPKPEPKPHPEPEPKPEPKPEPKPEPKPEPKPEPKPKPKPEPKPKPEPKPYPEPKPKPEPKPEPKPEPKPEPKPEPKPEPKPEPKPEPKPKPEPKPHPKPEPKPEPKPEPKPEPKPEPKPEPKPEPEPKPEPKPEPKPEPKPYPEPKPDPKPEPKPHPEPKPEPKPQPEPKPEPKPEPKPEPKPEPKPEPKPYPEPKPEPKPKPKPEPKPEAPPKKHKPPHIPPATDQ

SEQ ID NO: 117 - DNA, 711 bp, Oryza sativa
  CDS (1)..(711)
atggccggcgccgacgtggacgtcgggacggagctccggctggggctgcccggaggtggcggcggcgccgccgaggcggcggccaaggccgcgaagaggggcttcgaggagaccattgacctgaagctgaagctgcccaccgccggcatggaggaggccgccgccggcaaggcggaggcgccggccgccgagaaggccaagaggccggcggaggccgccgccgccgacgccgagaagccacctgctcccaaggcgcaggcagtgggttggccaccagttcggtcgttccgcaggaatatcatgaccgtccagtcagtgaagagcaagaaggaagaggaagctgacaagcagcagcagcagcccgctgccaatgccagcggcagcaacagctctgccttcgtgaaggtcagcatggacggggcaccctacctgcgcaaggtggacctgaagatgtacaacagctacaaggacctctcccttgctctgcagaagatgttcggcaccttcaccgcaactgggaacaatatgaatgaggtgaatggctctgatgctgttacaacttatgaagacaaggatggtgactggatgcttgttggagatgtcccgtggcagatgtttgtcgagtcatgcaaacgcttgaggatcatgaagggttccgaagccattggtcttgcaccaagagcaaaggacaagtacaagaacaagagctga

SEQ ID NO: 118 - protein, 236 aa, Oryza sativa
MAGADVDVGTELRLGLPGGGGGAAEAAAKAAKRGFEETIDLKLKLPTAGMEEAAAGKAEAPAAEKAKRPAEAAAADAEKPPAPKAQAVGWPPVRSFRRNIMTVQSVKSKKEEEADKQQQQPAANASGSNSSAFVKVSMDGAPYLRKVDLKMYNSYKDLSLALQKMFGTFTATGNNMNEVNGSDAVTTYEDKDGDWMLVGDVPWQMFVESCKRLRIMKGSEAIGLAPRAKDKYKNKS

SEQ ID NO: 119 - DNA, 1257 bp, Oryza sativa
  CDS (1)..(1257)
acgcgtccggacttcgataagaaagttgtggattggcttgctagcaactttaagaaagatgaaggcattgatcttctgaaagacaaacaagccctgcagcgactcactgaggcagcagagaaagcgaagatggaactgtctacgctgtctcagacaaacattagcttgcctttcataactgctactgctgatgggcctaaacacatcgagacaactctctccagagccaaatttgaggagctatgttcggacctcattgataggcttaaaactcctgtcactaatgccttgagagatgccaaactgtctgttgataacctggacgaagtgattcttgttggtggatccactcgtatcccttccgtgcaagagcttgtgaagaagatcactggcaaggatcccaatgtcacagtcaaccctgatgaggttgtttctcttggggcagctgtacagggtggagttttggccggagatgtgaaagatgtcgttcttcttgatgttactccattgtctcttggtctggagacgttgggtggagtgatgaccaagattattcccagaaacacaacactgcccacctcaaaatcagaggtattctccacagctgcagatggacagacaagtgttgagataaatgttcttcagggagagagagagtttgtccgggacaacaagtctcttggaagcttccgcttggatggaatcccctccctgcaccacgtggtgttccacaaattgaagtcaagtttgatattgatgccaatggtatctcttctgttgctgctattgataagggtactgggaagaaacaggatatccccatcaccggcgcttagtacactgccaaaggatgaggttgagagaatggtggaagaggctgacaagtttgctcaggaggacaaagagaaaagagatgccattgataccaaaaaccaggcagactctgtggtctaccagactgagaagcaactgaaggagctaggtgacaaggtacctgcacctgtgaaagagaaggtggatgcaaagctcaacgagctcaaagaggccattgcgggtggatcaacacagagcatgaaggatgccatggctgctttaaacgaggaagttatgcagatcggccaggccatgtacaaccagcagcctaatgctggtgctgctggacctactcctggtgccgatgctggaccgacaagctcaggcggtaagggaccgaatgatggagatgttattgatgcggatttcactgacagcaattga

SEQ ID NO: 120 - protein, 418 aa, Oryza sativa
TRPDFDKKVVDWLASNFKKDEGIDLLKDKQALQRLTEAAEKAKMELSTLSQTNISLPFITATADGPKHIETTLSRAKFEELCSDLIDRLKTPVTNALRDAKLSVDNLDEVILVGGSTRIPSVQELVKKITGKDPNVTVNPDEVVSLGAAVQGGVLAGDVKDVVLLDVTPLSLGLETLGGVMTKIIPRNTTLPTSKSEVFSTAADGQTSVEINVLQGEREFVRDNKSLGSFRLDGIPSLHHVVFHKLKSSLILMPMVSLLLLLLIRVLGRNRISPSPALSTLPKDEVERMVEEADKFAQEDKEKRDAIDTKNQADSVVYQTEKQLKELGDKVPAPVKEKVDAKLNELKEAIAGGSTQSMKDAMAALNEEVMQIGQAMYNQQPNAGAAGPTPGADAGPTSSGGKGPNDGDVIDADFTDSN

SEQ ID NO: 121 - DNA, 960 bp, Oryza sativa
  CDS (1)..(960)
  misc_feature (64)..(64): Xaa at amino acid position 64 stands for Trp, or Leu.
  misc_feature (191)..(191): k is g or t
atggcggggtcgtcgtccctcagcacgctctccctctgcacgcagtcgccatcaccgtcaccggtggcgtccggccgcctcgtggcaccggctgtcctcggtttcgccggggccccgcggttcccgacgctgcgggccgcgccacggcggctgacggcgcgggcggtggccggggacgccgaggacgagtkggggaaggagccggcggcggaccagggcggtgccgccgcggcggtggccgaggcgcccgcggatgtgccggtgacgagcgaggtcgcggagctcaaggcgaagctgaaggaggcgctgtacggtacggagcgcggcctgcgcgcgtccagcgagacgcgcgcggaggtggtcgagctcatcacgcagctcgaggcccgcaaccccacgccggcgcccaccgaggcgctcaccctcctcaacggcaagtggatcctcgcgtacacctcattttcacagctattcccactattggggtctggtagtttgcctcagcttgtcaaggtggaagaaatatcacaaactattgattctgagaacttcacggttcagaattgcatcaagttttcaggacctttagcaacaacttcagtgtctaccaatgccaaatttgaagttcgaagtcccaaacgtgtacagatcaaatttgatgaaggcattatcggcactccacaattgactgattctattgtactacctgagaagtttgagttatttgggcagaatattgacctgaccccattgaagggcatattttcatcaattgaaaatgcagcatcctcagttgctagaaccatctctggtcaacctccactaaagataccaattaggactgacaatgctgagtcttggttgctcacaacctaccttgatgatgagcttagaatctccagaggtgatggcagcagcatctttgtactgtttaaggaaggaagcaccctcctatattaa

SEQ ID NO: 122 - protein, 319 aa, Oryza sativa
  misc_feature (64)..(64): The 'Xaa' at location 64 stands for Trp, or Leu.
MAGSSSLSTLSLCTQSPSPSPVASGRLVAPAVLGFAGAPRFPTLRAAPRRLTARAVAGDAEDEXGKEPAADQGGAAAAVAEAPADVPVTSEVAELKAKLKEALYGTERGLRASSETRAEVVELITQLEARNPTPAPTEALTLLNGKWILAYTSFSQLFPLLGSGSLPQLVKVEEISQTIDSENFTVQNCIKFSGPLATTSVSTNAKFEVRSPKRVQIKFDEGIIGTPQLTDSIVLPEKFELFGQNIDLTPLKGIFSSIENAASSVARTISGQPPLKIPIRTDNAESWLLTTYLDDELRISRGDGSSIFVLFKEGSTLLY

SEQ ID NO: 123 - DNA, 1557 bp, Oryza sativa
  CDS (1)..(1557)
atggtggttcttgcagcttctattatatcgaagtctggaaaagctcttgtttcgagacaatttgttgacatgtcccggataaggatcgatgggctgcttgcagcatttccgaagctggtcggaagtggaaagcaacatacttatgttgagactgaaaatgttcgttatgtctatcaaccaattgaagcactgtatttgcttctcatcacaaataagcaaagtaacattcttgaagatctggatactttaaggctactctccaagcttatacctgaatatgctccctctttggatgaagagggtgtctgtaaggcagcattcgagcttctgtttgcctttattgaagccatttctcttggaaacaaagagaacgtaactgttgcacaagttaaacaatactgtgaaatggagagccatgaagaaaagctgcacaagctggttatgcaaagcaaaataaatgaaactaaggatgtcatgaggaggaaagtcactgagattgagaaaagcaagactgatagagggaagcctgacaagggaggatttggatccttgagaactccaaacagcttcagtgacatgggcattagaggtggtggtccagggggcgatcctatatttggtgatatggactcgttcacccacaaggccaaaggccgcccatctgctcctgctcctgcatctgcttctactaaagttcctggtggtatgaaattaagcaaagcacagaagacaaaccagttccttgagtctttgaaagctgaaggagaagtcattttggaggacactcaaccaagtgcaactcaatcaaggtcatcatatatcccaccaagcgatcctatcacagtgacaattgaagagaagctcaatgtcactgttaaaagggatgggggagttagcaattttgatattcaaggaaccctggctctccaaattctgaatgacactgatggttttattcagttacagattgagaaccaagatgtacctggccttaacttcaagacacaccccaatatcaacaaagagttattcaacagtcaacaaattgtgggggcaaaagatccaaacaggcctttccccagtggtcaaaatgaaacaccgttggtgaaatggagaatccaggagttgaatgagtcatctcttccattggcagtgaactgttggccttcggtgtccggaaatgaaacctatgtgaacattgaatatgaagcttcagagatgtttgatttgcacaatgttgtcatctctatccctctccccgcacttagggaggctccaggtgttaggcagatagacggagaatggaggtatgactcaagaaattcagtgttggagtggtccattattcttgttgatcaatcaaaccgcagtggttctttggagttcactgtccctgcagctgatccatcaacattcttcccgatatctgttgggttttctgcatcaaatacatttagtgatttgaaggtgaccgccatccgtccgctgagggaaggtagcccaccaaagttttctcagaggaatcgattggttacttataactaccaagtggtttga

SEQ ID NO: 124 - protein, 518 aa, Oryza sativa
MVVLAASIISKSGKALVSRQFVDMSRIRIDGLLAAFPKLVGSGKQHTYVETENVRYVYQPIEALYLLLITNKQSNILEDLDTLRLLSKLIPEYAPSLDEEGVCKAAFELLFAFIEAISLGNKENVTVAQVKQYCEMESHEEKLHKLVMQSKINETKDVMRRKVTEIEKSKTDRGKPDKGGFGSLRTPNSFSDMGIRGGGPGGDPIFGDMDSFTHKAKGRPSAPAPASASTKVPGGMKLSKAQKTNQFLESLKAEGEVILEDTQPSATQSRSSYIPPSDPITVTIEEKLNVTVKRDGGVSNFDIQGTLALQILNDTDGFIQLQIENQDVPGLNFKTHPNINKELFNSQQIVGAKDPNRPFPSGQNETPLVKWRIQELNESSLPLAVNCWPSVSGNETYVNIEYEASEMFDLHNVVISIPLPALREAPGVRQIDGEWRYDSRNSVLEWSIILVDQSNRSGSLEFTVPAADPSTFFPISVGFSASNTFSDLKVTAIRPLREGSPPKFSQRNRLVTYNYQVV

SEQ ID NO: 125 - DNA, 126 bp, Oryza sativa
  CDS (1)..(126)
gcgccgtcaagctcatctggaaccacatcaaggccaacggcctccagaacccagcaaacaaaagggagattaactgtgacgataagcttaaaagcttattcgccgggaaggacaaggtcgggatga

SEQ ID NO: 126 - protein, 41 aa, Oryza sativa
APSSSSGTTSRPTASRTQQTKGRLTVTISLKAYSPGRTRSG

SEQ ID NO: 127 - DNA, 692 bp, Oryza sativa
  CDS (1)..(690)
gtcgccgtgcgcaagaaggagacgcgcgacggcgccatgcagaccatgccgtcgcgcgtgcagcagggcgccgccgacttcgaggagacgctcttcgtgcgctgccacctctactgcagcggcggcgccggcaccggcaagccgctcaggttcgagccccggccgttcctcctgtcggcggtggccgtggaagcccccgagctcgactttggccggagcgccgtcgacctgagcctcctcgtgaaggagtccacggacaagagccagcaaggggagcgtgtccggcaatgggacatggcgttgccgctcgccgggaaggcgaagggcggcgagctcgtcgtcaaactgtcgttccagatcatggacgacggcggcgtcgggctgttcaaccagaccggagcagcaaccaagattaactcgtcgtcgtcgtcttcttccttgtttgcacggaagcagagcaagctatccttcagcatcacgagcccgaaggtgtcgcggtcggagccgaagctgacgccgacaaagggctcgccgtcgccggacttgcgaggcattgacgacttcaagctcgacgagcccagtttgccatcgctggcagaggccaagcaagagcagaaggagccagagccgccggagccggaggagaaggtcgatgactcggagttcccggagttcgacgtagtggacaaagg

SEQ ID NO: 128 - protein, 230 aa, Oryza sativa
VAVRKKETRDGAMQTMPSRVQQGAADFEETLFVRCHLYCSGGAGTGKPLRFEPRPFLLSAVAVEAPELDFGRSAVDLSLLVKESTDKSQQGERVRQWDMALPLAGKAKGGELVVKLSFQIMDDGGVGLFNQTGAATKINSSSSSSSLFARKQSKLSFSITSPKVSRSEPKLTPTKGSPSPDLRGIDDFKLDEPSLPSLAEAKQEQKEPEPPEPEEKVDDSEFPEFDVVDK

SEQ ID NO: 129 - DNA, 1503 bp, Oryza sativa
  CDS (1)..(1503)
ctggacgaggtgatggcggtgagccccgtggggctagggcggcggtcgcggcagatattcgacgaggtgtggcgcaagttctcgcggctggggcagatgtcgagcgcgtcgtcgacggcgctggcggaggaggagcaggccgtgctcatccgcggcggacccatgtgcgagttcaccgtccccggcgcgcaggacaccaccgtcctcgtcgtcggcgccaccagccgcatcggccgcatcgtcgtccgcaagctcatgctccgcgggtacaatgtcaaggctttagttagaaggaatgatgctgaagtgatagatatgctcccaaggtcggtggatattgttgtcggtgatgttggtgatccttcaactgtcaaatcggctgtatcaggttgcagcaagataatctattgcgcaactgcacgctcaactattactggagacctaaatagggttgataatcaaggagtaaggaatgttagtaaggctttccaggattactacaatgaattggctcagcttagggctggtaaaagcagcaagagcaaactcctgatagcaaaatttaaatctcccaagtctctgaatggttgggaggtggaccagggatcttattttccaaacacatttgcttctaggtttgatgaaggtatcgatgcatcatttgacttttcagaggctggtcaagctgttttctcaggatttgttttcacaagaggtggatatgttgagatatcaaaaaggctatctcttcctttgggatctactctagacaggtatgatggcttacttttttcggtgggaggaaatggaagatcatatgttgttattcttgagactggtccgctggctgacacctcccagagcaagaagtactttgctcggatgactacaaaagtaggattttgtagggtgagggtaccattttcagcttttcggccagtaaaccctcaagatcctcccctagacccttttcttgtgcatacactaacaattaggtttgaacccaaaagacagagacctggtgatggatctcaaagtgctactgaccccagaaattttgagcttatattggaatacatcaaagctttgcctactggtcaagaaacagacttcattctggtctcatgctcaggttctgggattgaacctaacagaagagaacaagtcctcaaagcaaaaaaggctggagaggatgcattgagaaggtcaggccttggatacacaatagtacgccctggtccactgcaggaagaacctggtggtcagcgtgcattgatctttgatcaagggaacagaatctcgcagggtatcagttgcgccgatgtagcagatatttgtgtcaaagcattgcatgattccactgctaggaacaaaagttttgatgtatgctacgagtatgtagctaagcaagggaatgagctatatgaacttgtggcccatttaccagataaagctaacaactatcttacaccggcattatctgttctagagaagaacacctga

SEQ ID NO: 130 - protein, 500 aa, Oryza sativa
LDEVMAVSPVGLGRRSRQIFDEVWRKFSRLGQMSSASSTALAEEEQAVLIRGGPMCEFTVPGAQDTTVLVVGATSRIGRIVVRKLMLRGYNVKALVRRNDAEVIDMLPRSVDIVVGDVGDPSTVKSAVSGCSKIIYCATARSTITGDLNRVDNQGVRNVSKAFQDYYNELAQLRAGKSSKSKLLIAKFKSPKSLNGWEVDQGSYFPNTFASRFDEGIDASFDFSEAGQAVFSGFVFTRGGYVEISKRLSLPLGSTLDRYDGLLFSVGGNGRSYVVILETGPLADTSQSKKYFARMTTKVGFCRVRVPFSAFRPVNPQDPPLDPFLVHTLTIRFEPKRQRPGDGSQSATDPRNFELILEYIKALPTGQETDFILVSCSGSGIEPNRREQVLKAKKAGEDALRRSGLGYTIVRPGPLQEEPGGQRALIFDQGNRISQGISCADVADICVKALHDSTARNKSFDVCYEYVAKQGNELYELVAHLPDKANNYLTPALSVLEKNT

SEQ ID NO: 131 - DNA, 2688 bp, Oryza sativa
  CDS (1)..(2688)
atgatacgggcgatacgcgcgtgcaagacggcggcggaggagcgggcggtggtgcggcgggagtgcgcggcgatacgggcggccatcagcgagggggaccaggactaccgccaccggaacatggccaagctcatgttcatccacatgctcgggtaccccacccacttcggccagatggagtgcctcaagctcatcgccgccgcgggcttccccgagaagcgcatcgggtacctcggcctcatgctgctgctcgacgagcggcaggagaatgctatgttctgctttgagcatttggtagtacttaacgcggacagagatcttaaccactcgaaccagttcattgtggggcttgcactctgtgctcttggcaacatttgctccgctgaaatggcgcgtgatctgtcacctgaggtggagaggctattgcaaagtagggaaccaaataccaagaagaaggctgccttatgctctataaggatcgtacggaaggttccagatttggcagagaacttcatgggctctgctgtttcactactgaaggaaaaacatcacggggttctcatatctgctgttcagctctgcgcagaactttgtaaagcaagcaaagaggcattggagtacctgaggaagaactgccttgatggtttggtcagaatactgagagatgtgtccaatagttcatatgctcctgaatatgacattgctggaattacggatccgttcttgcatatcagagtgcttaagctcatgcgaattttgggtcaaggagatgcagattgcagtgagtttgtgaatgatattcttgctcagctgtgctctgtatcttatatcgaattatttgcattgcatttccaggttgcaacaaaaactgagtcaaataagaacgcaggaaatgctattttatatgaatgtgttgagactataatgggcatcgaagctactagtggtttacgtgtgctggcaatcaatatcttgggtagatttctgtccaaccgtgataataacatcagatatgttgctctgaacatgcttatgaaggccatggaggtagacacgcaagcagtgcagaggcatagagcaacaatattagagtgtgtcaaggatgctgatgtatctattcgcaaaagggcccttgaacttgtttaccttcttgtcaacgatgcaaatgcaaaatctttgaccaaggagcttgttgattacctggaagtaagtgatcaggacttcaaggacgacctcacagcaaagatatgctcaattgttgaaaagttttcccaagataaactttggtacttagaccagatgttcaaggttttatctctggctggaaattatgtgaaggacgatgtatggcatgctctaatagtcttaataagcaatgcatctgaactccaaggatactcagtgagatcattatacaaggcattgctagcttgcggtgaacaggaaagtttggttagggtagctgtatggtgcattggtgagtatggtgaaatgctggtgaacaatgttggtatgctggacatagaggaaccaatcacggtaacagaatctgatgccgtggatgctgtagaggtctctcttaaacgatactctgcagacgtgacaactcgggctatgtgtctagtatctctcttgaagctctcttcccgattcccaccgacttcagaatcatctttgcttgagcggatgcctgtgatagatgaagctagttacttggctaagagagctgcttccacacaagcaactatttcatcagataaattagctgctgcagcaactcctggaagctcgcttaagcttccaaatggtgtagcaaagccaccaccggctcctctagctgatttgcttgatttaagttctgacgatgctcctgcgactacttccgcccctactacagcacctaatgatttcctacaggatcttttgggcataggcttgactgatacatctacagcaggttttgatcttacttttttgttcattcagtacatatttggtttgacaagtgaagcaagtgatgctcatattctcacatttgatactcatttatgtggagctccatcagcaagcacagatattctgatggatcttctatcaattggttcttctccagtacaaaatggcccaccaacagtatcaaactttagccttcctggtcaagatgagaatacagcttacccgccaatcacagctttccagagtgcagctttgaagatcactttcaattttaagaagcagtctggaaaacctcaggagactacaattcatgctagctttacaaatttgacatctaatacattcacggatttcatctttcaggcagctgtaccaaagtttatccagttgcgtttggaccccgctagcagcaacacgcttcctgccagtggaaatgattctgttacacaaagcctcagtgtcacaaataaccaacatggacagaaaccccttgcgatgcgtatccggataacttacaaagtgaacgacaaactcatcatgaatcggaggagatgctcgacaaaatatgacctggtaaagcactcgagtctcctggccatcgaggcgataaaccctcccttgtaccgaagtgaacgagcactagtgcacgagtacttagcctgtgtctatcgctttcggccgtttcgaaacgctcccgtccaagcaataagacgagacgtggctgagatataa

SEQ ID NO: 132 - protein, 895 aa, Oryza sativa
MIRAIRACKTAAEERAVVRRECAAIRAAISEGDQDYRHRNMAKLMFIHMLGYPTHFGQMECLKLIAAAGFPEKRIGYLGLMLLLDERQENAMFCFEHLVVLNADRDLNHSNQFIVGLALCALGNICSAEMARDLSPEVERLLQSREPNTKKKAALCSIRIVRKVPDLAENFMGSAVSLLKEKHHGVLISAVQLCAELCKASKEALEYLRKNCLDGLVRILRDVSNSSYAPEYDIAGITDPFLHIRVLKLMRILGQGDADCSEFVNDILAQLCSVSYIELFALHFQVATKTESNKNAGNAILYECVETIMGIEATSGLRVLAINILGRFLSNRDNNIRYVALNMLMKAMEVDTQAVQRHRATILECVKDADVSIRKRALELVYLLVNDANAKSLTKELVDYLEVSDQDFKDDLTAKICSIVEKFSQDKLWYLDQMFKVLSLAGNYVKDDVWHALIVLISNASELQGYSVRSLYKALLACGEQESLVRVAVWCIGEYGEMLVNNVGMLDIEEPITVTESDAVDAVEVSLKRYSADVTTRAMCLVSLLKLSSRFPPTSESSLLERMPVIDEASYLAKRAASTQATISSDKLAAAATPGSSLKLPNGVAKPPPAPLADLLDLSSDDAPATTSAPTTAPNDFLQDLLGIGLTDTSTAGFDLTFLFIQYIFGLTSEASDAHILTFDTHLCGAPSASTDILMDLLSIGSSPVQNGPPTVSNFSLPGQDENTAYPPITAFQSAALKITFNFKKQSGKPQETTIHASFTNLTSNTFTDFIFQAAVPKFIQLRLDPASSNTLPASGNDSVTQSLSVTNNQHGQKPLAMRIRITYKVNDKLIMNRRRCSTKYDLVKHSSLLAIEAINPPLYRSERALVHEYLACVYRFRPFRNAPVQAIRRDVAEI

SEQ ID NO: 133 - DNA, 394 bp, Oryza sativa
  CDS (1)..(393)
ggtgtggagacggttgtgacggacacggcggggaacaaggtggtggtcaccggcgcggcggacgcggcggagctgaaggagcgcatcgaggcgcggaccaagaaggccgtgcagatcgtctccgccggcgccggcccgccgcccaagaaggataaggaggagaagaaggacaaggacaagaagggcggcggcgacgacaagaaggccgagaaggagaagggcggcggcggcggcgataagaaggcggagaaggagaagggcggcggcgacaagcccaaggaggagaagaaagccaaggagcccaaagaggagacggtgacgctcaagatccgcctccactgcgagggatgcatcgaccgcatcaagcgccgcatctgcaagatcaaagggggca

SEQ ID NO: 134 - protein, 131 aa, Oryza sativa
GVETVVTDTAGNKVVVTGAADAAELKERIEARTKKAVQIVSAGAGPPPKKDKEEKKDKDKKGGGDDKKAEKEKGGGGGDKKAEKEKGGGDKPKEEKKAKEPKEETVTLKIRLHCEGCIDRIKRRICKIKGG

SEQ ID NO: 135 - DNA, 194 bp, Oryza sativa
  CDS (1)..(192)
ggcgaccaggggaggacgtacctgttcagggtgtccaatgtcggggtgaagacgtccgtcaatgtcaggatccaggggcactcgctgaggttggtggaggtggaggggacgcacccggtgcagaacgtgtacgactcgctcgacgtccatgtcggccagtcggtggcgttcctcgtcacgctcgacaaggcggc

SEQ ID NO: 136 - protein, 64 aa, Oryza sativa
GDQGRTYLFRVSNVGVKTSVNVRIQGHSLRLVEVEGTHPVQNVYDSLDVHVGQSVAFLVTLDKA

SEQ ID NO: 137 - DNA, 2815 bp, Oryza sativa
  CDS (1)..(2814)
  misc_feature (34)..(34): Xaa at amino acid position 34 stands for Lys, or Asn.
  misc_feature (102)..(102): m is a or c
atggccgccctcttcctcctcctcctcctccacgtatcagacgccgccatcaacccgggcgacctgtccgtgctccacgacctgcgccgctcgctgaccaamgccgaagccgtcctcggctggggcgaccccaacgccgccgacccgtgcgccgcatggccgcacatctcctgcgaccgcgccggccgcgtcaacaacatcgacctcaagaacgccggcctcgccgggacgctccccttcacctttgccgcgctcgacgcgctccaggacctcagcctccagaaccacaacctctccggcgacctcccgtccttccgcggcatggcctccctccgccacgccttcctcaacaacaactccttccgctccatccccgccgacttcttcagcggcctcacctccctcctcgtcatctccctcgaccagaacccgctcaacgtctcctccggggggtggacgatccccgccgacgtcgccgccgcgcagcagctgcagagcctcagcctcaacggatgcaacctcaccggcgccatcccggacttcctcggcgccatgaacagcctccaggagctcaagctcgcctacaacgccctctccggacccatcccctccaccttcaacgcctccgggttgcagacgctctggctcaacaaccagcacggcgtccccaagctctccggcacgctcgacctcatcgccaccatgcccaacctcgaacaggcatggctccacggcaacgacttctccggccccatcccggactccatcgccgactgcaagcgcctctccgacctctgcctcaacagcaaccagctcgtcggcctcgtcccaccggcgctcgagtccatggccggcctcaagtccgttcagctcgacaacaacaatctcttgggccccgtcccggcgatcaaggcgcccaagtacacctactcacagaacgggttctgcgccgacaagccgggggtcgcctgctcgcctcaggtgatggcattgcttcacttcctcgccgaggtcgattaccccaagaggctggtagctagttggtccgggaacaattcctgcgtggattggctgggaattagctgcgttgcagggaatgtgacgatgctcaatttgccggagtatggactcaatggcacaatcagcgacagtcttgggaatctgagtgaactctcggacatcaacctcatcggaaataaccttactgggcatgtgccggatagcctcacaagcctcaggttgctgcagaagctggacctgtccgggaacgacctgaccgggccgctgcccaccttcagcccgagtgtgaaggtgaatgtgaccggcaatctcaacttcaatgggacggcaccaggatcagcgccatccaaggatactcctgggtcttcgtcgtccagggcgccaaccttgcctggccagggcgtccttccggaaaataagaagaaaagatcagctgttgtgttggccaccaccatcccggttgcagtcagtgtggtggctctggcttcagtgtgtgccgtgctcatcttccgtaagaaaaggggatcagttccaccaaatgcagcttccgtcgtcgtccacccccgcgagaattctgacccagacaacttggtcaagattgtcatggtgaacaatgatggcaacagtagttcgacccaaggcaatacacttagcgggagcagcagccgcgctagtgatgttcacatgatcgatacgggcaatttcgtgattgctgtgcaggtcctccgtggcgcaaccaagaactttacccaggacaatgtgcttggccgtgggggctttggtgtcgtctacaagggtgagctgcatgacggcacgatgattgctgtgaagaggatggaggctgcagtgatcagcaacaaggccttggatgagttccaagccgagattaccattctaaccaaggtacggcaccgcaacctggtctcgatactgggttactcaattgaagggaatgagaggctgctggtctatgagtacatgtccaacggggctttgagcaagcatctgttccagtggaagcagtttgaattagaacccctctcatggaagaagaggctcaatattgcactggatgttgctcgtgggatggaatatctgcacaacctggcacatcagtgctacatccatagggatctcaagtcagcaaacattctcctcggcgacgatttccgagcaaaggtatcagactttgggctagttaaacatgcaccagatggaaacttctctgtggcaaccagactcgctggaacttttgggtacttggctcctgaatatgctgtgactgggaaaatcacgacaaaagcagatgtcttcagctttggggtagtgctgatggagctgataactggaatgactgccattgatgagagccgtctggaggaggaaacccgttatctggcctcatggttctgtcagataaggaaggatgaagataggctcagagcagccattgatcctactctggatcaatctgatgagacttttgagagcatctccgtgatcgcagagcttgctggccactgcacatcccgggaacccacccagcgaccggacatgggccacgccgtgaacgtgctcgtcccgatggtagagaaatggaagcctgtgaacgacgagaccgaggactacatgggcattgatctgcaccagccgttgctccagatggtgaagggctggcaggacgcagaggccagcatgacagatggaagcatcctgagccttgaggacagcaagggcagcatcccagctcggcctgccgggtttgcagaatcgttcacctcggctgatggccggt

SEQ ID NO: 138 - protein, 938 aa, Oryza sativa
  misc_feature (34)..(34): The 'Xaa' at location 34 stands for Lys, or Asn.
MAALFLLLLLHVSDAAINPGDLSVLHDLRRSLTXAEAVLGWGDPNAADPCAAWPHISCDRAGRVNNIDLKNAGLAGTLPFTFAALDALQDLSLQNHNLSGDLPSFRGMASLRHAFLNNNSFRSIPADFFSGLTSLLVISLDQNPLNVSSGGWTIPADVAAAQQLQSLSLNGCNLTGAIPDFLGAMNSLQELKLAYNALSGPIPSTFNASGLQTLWLNNQHGVPKLSGTLDLIATMPNLEQAWLHGNDFSGPIPDSIADCKRLSDLCLNSNQLVGLVPPALESMAGLKSVQLDNNNLLGPVPAIKAPKYTYSQNGFCADKPGVACSPQVMALLHFLAEVDYPKRLVASWSGNNSCVDWLGISCVAGNVTMLNLPEYGLNGTISDSLGNLSELSDINLIGNNLTGHVPDSLTSLRLLQKLDLSGNDLTGPLPTFSPSVKVNVTGNLNFNGTAPGSAPSKDTPGSSSSRAPTLPGQGVLPENKKKRSAVVLATTIPVAVSVVALASVCAVLIFRKKRGSVPPNAASVVVHPRENSDPDNLVKIVMVNNDGNSSSTQGNTLSGSSSRASDVHMIDTGNFVIAVQVLRGATKNFTQDNVLGRGGFGVVYKGELHDGTMIAVKRMEAAVISNKALDEFQAEITILTKVRHRNLVSILGYSIEGNERLLVYEYMSNGALSKHLFQWKQFELEPLSWKKRLNIALDVARGMEYLHNLAHQCYIHRDLKSANILLGDDFRAKVSDFGLVKHAPDGNFSVATRLAGTFGYLAPEYAVTGKITTKADVFSFGVVLMELITGMTAIDESRLEEETRYLASWFCQIRKDEDRLRAAIDPTLDQSDETFESISVIAELAGHCTSREPTQRPDMGHAVNVLVPMVEKWKPVNDETEDYMGIDLHQPLLQMVKGWQDAEASMTDGSILSLEDSKGSIPARPAGFAESFTSADGR

SEQ ID NO: 139 - DNA, 2844 bp, Oryza sativa
  CDS (1)..(2844)
atgccgtcggtttcgagggccgtgtgcgtgcagagggcgagcgggaataacggcaggaggtgcagagatggggcggccgccgccggccgccgatccgtcgtggcgcagagagcgcggcacggcaagccggaggtcgccatccgctcggggtccggcggctcggcgcggggcgggcattgctcgcctctcagggcagtggcggcgccgatcccgactaccaaaaagagggtgttccacttcggcaagggcaagagcgagggcaacaaggccatgaaggacctgctgggagggaagggggcgaacttggcggagatggcgagcatcgggctgtcggtgccgccggggttcacggtgtcgacggaggcgtgccagcagtaccaggcggcggggaagacgctgccggcggggctgtgggaggagatcgtcgaggggctccagtgggtggaggagtacatggcggcgcgcctcggcgaccccgcccgccctctcctcctctccgtccgctccggcgccgccgtgtcgatgccggggatgatggacacggtgctgaacctggggctgaacgacgaggtggcggcgggactggcggccaagagcggcgaccgcttcgcgtacgactcctaccgccgtttcctcgacatgttcggcaacgtggtcatggacattcctcatgcactgttcgaggagaagctcgaagccatgaaagcagtcaaggggctgcacaacgacactgacctgactgccactgacctcaaagaactagtggcacagtacaaggatgtctatgttgaagctaagggagagccattcccctctgatcccaagaagcaactgcagctggccgtgttggccgtgttcaactcatgggatagcccaagagcaatcaagtacagaagcataaacaagatcactgggctgaagggcactgctgtaaacgtgcagaccatggtgtttggaaacatggggaacacctctggcacgggtgtgctcttcactaggaacccaagcactggagagaagaagctttacggcgaattccttgtgaatgctcagggtgaagatgtggttgctggaatcagaactccagaggatcttgatgctatgagggaccacatgccggagccttatgaagagctcgttgagaactgcaaaattttggagagtcactataaagaaatgatggatattgaatttactgttcaggaaaataggctttggatgcttcagtgcagaacaggaaagcgcacaggaaaaggtgctgtaaagattgctctagacatggttaacgagggccttgttgagcgccgcacagcacttaagatggtagaaccaggtcacctggatcagcttcttcatcctcagtttgagaacccatcagggtataaagacaaagttattgccacgggcttacctgcatcacctggggctgctgtgggccaaattgtattcactgccgaggatgctgaagcatggcatgcccaagggaaagatgttattctggtgaggacagagaccagcccagaggatgttggtggcatgcatgcagctgttggaattcttacagcaagaggtggtatgacctctcacgctgctgttgttgcgcgcggatggggcaaatgttgtgtgtcaggatgctcaagcgtccgtgtaaatgatgcgtccaagattgtagtgattgaagacaaggcgctgcatgaaggtgagtggctatcgttgaatggatcaactggtgaagtgatcattggcaagcagccactctgcccaccagcccttagtggtgatttggaaactttcatgtcttgggtggatgaagttaggaaactcaaggttatggcaaatgctgatacccccgaggatgcaacaacagccagacagaatggggcagaaggaattgggctatgccggactgaacatatgttcttcgcttcagacgagaggattaaggctgtcaggcagatgattatggcttcaagtcttgaactgaggcagaaagcactagatcgccttttgccttatcagaggtctgactttgaaggcatcttccgtgcaatggatgggcttccggtaactattagactcttggatcctccacttcatgagttccttccagaaggccatgttgaggatatggtgcgtgagctatgctctgaaactggagcagctcaggatgatgtccttgcaagagtagaaaaactttccgaagtaaatccaatgcttggtttccgtgggtgcaggcttggtatatcataccctgaattgactgaaatgcaagcccgtgccatctttgaagctgctataaccatgaccaaccagggtattcaagtctttccggagataatggttccccttgttggaactcctcaggaattggggcatcaagtggatgttatccgtcaaattgccaacaaggtgttcacagacatgggaaaaactattggctacaaagttggaactatgattgaaattcccagggcagctttagtggctgatgagatagcagagcaggctgagttcttctcctttggaacaaacgacctaacacagatgacatttggttacagtagggatgatgtggggaagttccttcccatctatctgtctcagggtatcctccagcatgacccctttgaggtgcttgatcagaggggagttggggagctggttaagctggctacagagagaggccgcaaagctaggcctaacttgaaggtgggcatctgtggtgaacatggtggagagcctctgtcagtcgctttctttgcgaaggctgggctggactatgtttcttgttcgcctttcagggtcccaattgctaggctagctgcagctcaggtgctcctctga

SEQ ID NO: 140 - protein, 947 aa, Oryza sativa
MPSVSRAVCVQRASGNNGRRCRDGAAAAGRRSVVAQRARHGKPEVAIRSGSGGSARGGHCSPLRAVAAPIPTTKKRVFHFGKGKSEGNKAMKDLLGGKGANLAEMASIGLSVPPGFTVSTEACQQYQAAGKTLPAGLWEEIVEGLQWVEEYMAARLGDPARPLLLSVRSGAAVSMPGMMDTVLNLGLNDEVAAGLAAKSGDRFAYDSYRRFLDMFGNVVMDIPHALFEEKLEAMKAVKGLHNDTDLTATDLKELVAQYKDVYVEAKGEPFPSDPKKQLQLAVLAVFNSWDSPRAIKYRSINKITGLKGTAVNVQTMVFGNMGNTSGTGVLFTRNPSTGEKKLYGEFLVNAQGEDVVAGIRTPEDLDAMRDHMPEPYEELVENCKILESHYKEMMDIEFTVQENRLWMLQCRTGKRTGKGAVKIALDMVNEGLVERRTALKMVEPGHLDQLLHPQFENPSGYKDKVIATGLPASPGAAVGQIVFTAEDAEAWHAQGKDVILVRTETSPEDVGGMHAAVGILTARGGMTSHAAVVARGWGKCCVSGCSSVRVNDASKIVVIEDKALHEGEWLSLNGSTGEVIIGKQPLCPPALSGDLETFMSWVDEVRKLKVMANADTPEDATTARQNGAEGIGLCRTEHMFFASDERIKAVRQMIMASSLELRQKALDRLLPYQRSDFEGIFRAMDGLPVTIRLLDPPLHEFLPEGHVEDMVRELCSETGAAQDDVLARVEKLSEVNPMLGFRGCRLGISYPELTEMQARAIFEAAITMTNQGIQVFPEIMVPLVGTPQELGHQVDVIRQIANKVFTDMGKTIGYKVGTMIEIPRAALVADEIAEQAEFFSFGTNDLTQMTFGYSRDDVGKFLPIYLSQGILQHDPFEVLDQRGVGELVKLATERGRKARPNLKVGICGEHGGEPLSVAFFAKAGLDYVSCSPFRVPIARLAAAQVLL

SEQ ID NO: 141 - DNA, 1339 bp, Oryza sativa
  CDS (1)..(1338)
ggcgaagaagatgagcacccccatgaaggccgtgccggcgtcgagcgccgccgacagcacgtagttgtacttctgccaccaccccttgcggtacttgaacacgaagtagttgaagatggtgcccgtgacgagccagctcgcgatgttggtcggcgtcgccggcggcatcccggcgaacccgtaggagatgacggggacgttgatgagcgcgatccacttcttctccgggaacgccctgctgagcagccacaccggcacgggcagcacggcgccggcgaggaacagccacaccaggttgcggtacaggccgtggcggccgaacagccgggcggggccgatgagcccccagatcaccgacgcgtcgaacgtgacccggtacttggggcacgtccacgggctgtccgggtgcagcgcctccacgtcgcagatgttgtcgatgctgcccagcatccaccacgccaccgccaggttcaccacgccggcgaccaccgtgcccaccagctgcgccgtgtacatgcaccgcggcgggatcttcatgtagtgccccagcttgaggtccgcgaggaacgacagcgcgtgcaccgtgctgatcctcccgtagatcttgaacagcaggttcgcgatcggcttccccggcagcgcgtacccgatcatgaactgcgcgatgatgtcgtaccccggttgctggttggtggtggcctggatgacgccgatggggagggtgacgacgaaggcgagggcgaaggcgaagagcatcccccaccacggcagctgcacctcctccctgtacacgaacgacatgaccagcgacacggcgacgctgccgacgagcagcacgaggaaccaccactgcggcacctgcttgtaccgccgcatcagcttcgcgtgcacgtccatcttcgccgccgcggagctcatcgccgacctgctctgcctccagatgtccccgccgtggaacagcgccacgtgcacgatcgtcgccgtgaacctcaggaacccggacccgatggagatggcgaacagcgggctcaggtacagcttcccgtagctctcgtacgccgccacgttgaggtcgaactccctcgtgagcaccttggtggtgtcgtacttctgcccggacgccgtgaacagctggttggagaagattgggaacttcctcgcgtcgaacgtgtcgaacttccagtagcagagcggcacgatgaggtagatgaacatgacgaagcccgcggcggtgttggcgatggacgaccacggcgccaccagcgggctcccgtggtacgccgagatgccggcccagtccagtgtgaaggcgccgacgccgaggccgtggtagccggag

SEQ ID NO: 142 - protein, 446 aa, Oryza sativa
GEEDEHPHEGRAGVERRRQHVVVLLPPPLAVLEHEVVEDGARDEPARDVGRRRRRHPGEPVGDDGDVDERDPLLLRERPAEQPHRHGQHGAGEEQPHQVAVQAVAAEQPGGADEPPDHRRVERDPVLGARPRAVRVQRLHVADVVDAAQHPPRHRQVHHAGDHRAHQLRRVHAPRRDLHVVPQLEVREERQRVHRADPPVDLEQQVRDRLPRQRVPDHELRDDVVPRLLVGGGLDDADGEGDDEGEGEGEEHPPPRQLHLLPVHERHDQRHGDAADEQHEEPPLRHLLVPPHQLRVHVHLRRRGAHRRPALPPDVPAVEQRHVHDRRREPQEPGPDGDGEQRAQVQLPVALVRRHVEVELPREHLGGVVLLPGRREQLVGEDWELPRVERVELPVAERHDEVDEHDEARGGVGDGRPRRHQRAPVVRRDAGPVQCEGADAEAVVAG

SEQ ID NO: 143 - DNA, 4131 bp, Oryza sativa
  CDS (1)..(4131)
atggggtcgctcaccagggcggaggaggaggagacggcggcggccgaggagtggtcgggcgaggcggtcgtctacgtcaacggcgtccgccgcgtgctccccgacggcctcgctcacctcaccctgctccaatacctcagagacattggtcttcctggaacaaagcttggatgtggtgaaggtggctgtggagcctgcactgtgatggtctcatgctatgatcaaactacaaagaagacacagcattttgcaatcaacgcatgcttggctccgctttattctgtggaaggaatgcacataatcacagtagagggaattgggaatcgtcagcgaggtttgcacccaatccaggaacgtttagccatggcccacggttcacaatgtggattttgcacccctggttttgtgatgtcgatgtatgcattgctgagatcaagtgaacagcctcctactgaagagcagattgaagatagccttgcaggaaatttatgtcgctgtactggctacagaccaataatagacgccttccgtgttttctcgaaaagagatgatcttttgtacaacaattcatctctgaaaaatgcagatggccgacctatctgcccttcaacaggaaaaccatgttcctgcggagatcagaaagacatcaatggtagtgaatcttcattattgacacctacgaaaagctactcaccttgttcatacaatgagattgatggaaatgcgtacagtgagaaagaactcattttccccccagaacttcagttgagaaaagttacgtcacttaaattgaatgggtttaatgggattcggtggtatagacctcttaaactaaagcaagtattgcatttgaaagcatgctacccaaatgcaaaactaatcattggtaactctgaagtaggagttgaaacaaagttcaagaatgcccagtataaggtcttgatctcagttactcatgttccagagcttcatacccttaaagtgaaagaggatggtatacatattggttcttctgtaagacttgcacagctccaaaatttcctcagaaaggttattttagagcgtgattcacatgaaatttcatcctgtgaggcaatactgcggcaattaaaatggtttgctgggacacaaatcaggaatgttgcttctgttggaggtaacatttgtactgctagtccaatatcagatctaaatccactttggatggctacaggtgcaacgtttgagataattgatgtgaacaataatattaggaccattcctgcaaaagatttttttctgggttatcgtaaagttgacttaaaacctgatgagatattgctctctgttatactgccatggacaaggccatttgaatttgtcaaagaattcaagcaggcacatagaagggaggatgacattgcgttggtgaatgctggaatgcgtgtctatataagaaaagttgaaggtgattggataatttcggatgtttcaattatctatggaggggtagctgcagtttcacaccgtgcttcaaaaactgaaacctttctcactggaaaaaaatgggactatggattgttggataagacttttgatctgttgaaagaagacgtagttctggctgaaaatgcacctggtggaatggttgaatttcgcagttcacttactttgagtttctttttcaaatttttccttcatgttactcatgaaatgaatataaaaggattttggaaggatggattacatgcaaccaatctttcagccatacagtctttcactagacctgtcggtgttggaactcaatgttatgaattggttagacaaggaactgcagttggccaacctgtggttcacacatcagctatgcttcaggttactggtgaagcggaatatactgatgacacaccgacaccccccaataccttgcatgctgctctggtgctgagtacgaaagctcacgcacgcatattatctattgatgcttcacttgccaaatcttcccctgggtttgcgggtctcttcctttcaaaagacgtgcctggcgctaaccatactgggcctgttatccatgacgaggaggtttttgcatctgatgttgttacatgtgttggccagattgttggacttgttgtggcagatacccgtgataatgcaaaagctgctgcaaataaagtcaatattgagtattctgaacttccagcaattttatccatagaggaagctgtgaaagctggtagctttcatccaaatagcaagagatgcctagtaaaaggtaatgttgaacaatgttttctgtcgggtgcatgcgatagaattatagaaggaaaagtacaagttggaggtcaagagcacttctacatggagcctcagagcactcttgtatggccagttgattctggaaatgaaattcatatgatttcatctacccaggctccccagaagcaccaaaagtatgttgctaatgttcttggtcttccacaatcaagagttgtttgcaagactaagcgtattggtggtggatttggtggaaaagaaaccagatcagcaatatttgctgcagcagcatctgtagctgcttattgtttaaggcagcctgtaaagcttgttttggacagggatattgacatgatgacaactggacagaggcacagtttcctagggaagtacaaggtgggatttaccgatgatgggaagatattggccttagaccttgatgtttataacaatggtggtcattcacatgatttgtcccttccagtcctggagcgtgctatgtttcattcagacaatgtctatgatataccaaatgtcagagtcaatgggcaagtatgtttcacaaatttcccaagcaatactgctttcagaggttttggtggtccacaagctatgctgattgcagagaattggattcagcacatggctacagaactcaagcgaagtcctgaggagataaaagaacttaattttcaaagtgagggatctgtgcttcattatggccagttgcttcaaaattgtacaatacattcagtatgggatgaactaaaggtttcttgtaattttatggaagctcgcaaagctgtaattgattttaacaataataaccgttggagaaagcgtggcattgctatggttcccaccaagtttgggatatccttcactacaaaattcatgaatcaggttctgaggatgaacaattgcaggctgtgcttagtgcaagtttacactgatggaactgtccttgtaacgcatggtggggttgaaatggggcagggtttacacacaaaggtagcccaagttgcggcttcatcattcaatatccctcttagctctatatttatctcagaaacaagcactgataaggtaccaaatgcaacaccaacagcagcctctgctagttcagatttatatggtgctgcagttttggatgcttgtcagcaaattatggctcggatggaacctgttgcttcaagaggaaaccacaagtcctttgctgagttggttctagcatgctacctggaaaggatagatctctctgctcatggattttatatcactcctgatgttgggtttgactgggtgtctggcaagggaactccattctactatttcacatacggagcagcatttgcagaagttgaaattgataccctaactggggatttccacacaaggacagtagatattgttatggatcttggctgttcaattaatccggctattgatattggccagattgaaggaggttttatccaaggattaggttgggcggccctggaagaactaaaatggggggatgataaccacaagtggattcgacctggacatcttttcacttgtgggcctggctcttacaaaataccctctgtaaatgatatacctctaaacttcaaggtctcacttttgaagggcgttttgaatccaaaggtcattcactcatccaaggctgtaggagagccaccgtttttcctcggttcagccgtcttgtttgccataaaggatgcgatatctgccgcaagagctgaggagggtcacttcgactggttcccactcgacagcccagcaacaccggaaagaataagaatggcatgcgtggattccatcacaaagaaatttgctagcgtatattaccgtcccaagcttagtgtatag

SEQ ID NO: 144 - protein, 1376 aa, Oryza sativa
MGSLTRAEEEETAAAEEWSGEAVVYVNGVRRVLPDGLAHLTLLQYLRDIGLPGTKLGCGEGGCGACTVMVSCYDQTTKKTQHFAINACLAPLYSVEGMHIITVEGIGNRQRGLHPIQERLAMAHGSQCGFCTPGFVMSMYALLRSSEQPPTEEQIEDSLAGNLCRCTGYRPIIDAFRVFSKRDDLLYNNSSLKNADGRPICPSTGKPCSCGDQKDINGSESSLLTPTKSYSPCSYNEIDGNAYSEKELIFPPELQLRKVTSLKLNGFNGIRWYRPLKLKQVLHLKACYPNAKLIIGNSEVGVETKFKNAQYKVLISVTHVPELHTLKVKEDGIHIGSSVRLAQLQNFLRKVILERDSHEISSCEAILRQLKWFAGTQIRNVASVGGNICTASPISDLNPLWMATGATFEIIDVNNNIRTIPAKDFFLGYRKVDLKPDEILLSVILPWTRPFEFVKEFKQAHRREDDIALVNAGMRVYIRKVEGDWIISDVSIIYGGVAAVSHRASKTETFLTGKKWDYGLLDKTFDLLKEDVVLAENAPGGMVEFRSSLTLSFFFKFFLHVTHEMNIKGFWKDGLHATNLSAIQSFTRPVGVGTQCYELVRQGTAVGQPVVHTSAMLQVTGEAEYTDDTPTPPNTLHAALVLSTKAHARILSIDASLAKSSPGFAGLFLSKDVPGANHTGPVIHDEEVFASDVVTCVGQIVGLVVADTRDNAKAAANKVNIEYSELPAILSIEEAVKAGSFHPNSKRCLVKGNVEQCFLSGACDRIIEGKVQVGGQEHFYMEPQSTLVWPVDSGNEIHMISSTQAPQKHQKYVANVLGLPQSRVVCKTKRIGGGFGGKETRSAIFAAAASVAAYCLRQPVKLVLDRDIDMMTTGQRHSFLGKYKVGFTDDGKILALDLDVYNNGGHSHDLSLPVLERAMFHSDNVYDIPNVRVNGQVCFTNFPSNTAFRGFGGPQAMLIAENWIQHMATELKRSPEEIKELNFQSEGSVLHYGQLLQNCTIHSVWDELKVSCNFMEARKAVIDFNNNNRWRKRGIAMVPTKFGISFTTKFMNQVLRMNNCRLCLVQVYTDGTVLVTHGGVEMGQGLHTKVAQVAASSFNIPLSSIFISETSTDKVPNATPTAASASSDLYGAAVLDACQQIMARMEPVASRGNHKSFAELVLACYLERIDLSAHGFYITPDVGFDWVSGKGTPFYYFTYGAAFAEVEIDTLTGDFHTRTVDIVMDLGCSINPAIDIGQIEGGFIQGLGWAALEELKWGDDNHKWIRPGHLFTCGPGSYKIPSVNDIPLNFKVSLLKGVLNPKVIHSSKAVGEPPFFLGSAVLFAIKDAISAARAEEGHFDWFPLDSPATPERIRMACVDSITKKFASVYYRPKLSV

SEQ ID NO: 145 - DNA, 2529 bp, Oryza sativa
  CDS (1)..(2529)
ggtgctggcctgcaaaatcttgggaacacttgctacctgaactcggtgctgcaatgcttgacgtacacagaaccatttgcggcctatttgcagagcgggaagcacaagtcttcatgtcgtactgctggattttgtgcactatgtgctcttcaaaaccatgttaagactgctctacagtcaactggaaaaatagtgacgccatcacagattgtcaagaacttgcgctgcatctcccgtagtttccgcaattcaaggcaggaggatgcacatgagttaatggttaatttacttgaatccatgcataaatgttgtctaccttctggagtaccaagtgagtctcctagtgcatatgagaagagcttagttcacaaaatatttggtggccgcctaagaagtcaggtgaaatgcacacagtgctcacattgctccaacaaatttgatcctttcttggatctcagccttgatattggtaaggccacgtctctggtgagggcacttcaaaatttcactgcggaagagctcttagatgggggagaaaagcaatatcagtgccaacgctgcaggaaaaaggttgtagcaaagaaaaagtttacaattgataaggcgccatatgttctgacaattcatctgaagcgctttagccctttcaacccccgtgaaaagattgacaaaaaagttgattttcagccaatgctagacttgaagccatttattagcgactctaaagtgagtaatttgaaatacagcctttatggtgttttggttcatgctggttggaacactcagtcaggccattattattgcttcgttcgaacttccagtggaatgtggcacaaccttgatgataaccaggtacgccaagtccgtgaggcagatgtattgagacagaaagcatatatgttattttatgtacgtgacagagttgggaatccgactccacgcaaggataatatcactgctaatatgccagccaggagaacaatacctgaaaagatctcaggtctgagtgatatgatccagagcggcgtaattgaagcaaaattgaacggttcctcgtctccttatggcgataagaggttgcacggcataagcaatgggaactcaatcaagacttcaagagagcattatttgaagaaagatggcaaaactgaagctcctaaagcctctgaaaacaatggcctggcttccacacagaaagcttctgcacctcaaattgatggtgctaccttatctgctcaatctaagcaaattacttcaactggtcacagagaggtatcttcatcagatcgatctgcatctcttacacatgtgattgtgaaccaagcagtggccatggttccgtcgcaggaattgcaaccaaaggttgatggcttaaccgatacctcttccctgggcaatggcaatgcgatattgtctgagcgaaataaacaaacatcccagcatcaaaatccattttctatgccagcttcccatggaaaggacacaggggcagggcttgctgcacaaactttcccaactaaggatgctattgtttcaaatggtgttgtacctagtagcagggatccaatttccagtgagaaggtgtgtggcttgcaaaaatccatcaagcaagatgacaaaacggtgaaagaacttcctataagtgagaacaatatagtatcaggacttgaacgagtcaacgccagaaaacagactagctctgaagtttccatgaaggtagctgcagctgattcgtgcaatagcaacacacctaaaagggtggatttgaagtcaaagaaacttgtgagatatccagtcatgaacatgtggcttgggcccagacaagttatgctaggttcactaaaggtacaaaagaaaaagaaatgcaatagaactagaagacggtctgtagtttgtgaggacatggccaatgccacttgttcaggtaacaacacaagcgagcagcaggcatcaacatcaacaacaacgtcgtctgaaactgtgcaatgtactcccagagggcggaaacgtgcctatgatagtgacagtcctaaaaataataaccagaagcaaaacaagcaagacgttattggagccgatactggtagtggtgaacttaacatggataagagaaatgttattagtgaaaccgctgctagtgctgagcttccgaagctgggtccaggctcttctgcaaatcaggaacattcaaggaacaatgttcatgcaaaattgggagttccccggcattttactgttctgacaagggacttggctgaagttactgttccatgctgggatgatgttgctgtgtcaaatgctgaggcaagagagtcaaaacattcagaaagcaagagcattggatatgtgttagatgaatgggacgaggagtatgaccgtggaaagaccaagaaaatcagaaattcaaaggaagactacggtggaccaaaccccttccaggaggaggccaactacatctcacagagaaacatgaaacagaggacctatcaacccaaatcctggaagaaacatgcccatgttagaagatga

SEQ ID NO: 146 - protein, 842 aa, Oryza sativa
GAGLQNLGNTCYLNSVLQCLTYTEPFAAYLQSGKHKSSCRTAGFCALCALQNHVKTALQSTGKIVTPSQIVKNLRCISRSFRNSRQEDAHELMVNLLESMHKCCLPSGVPSESPSAYEKSLVHKIFGGRLRSQVKCTQCSHCSNKFDPFLDLSLDIGKATSLVRALQNFTAEELLDGGEKQYQCQRCRKKVVAKKKFTIDKAPYVLTIHLKRFSPFNPREKIDKKVDFQPMLDLKPFISDSKVSNLKYSLYGVLVHAGWNTQSGHYYCFVRTSSGMWHNLDDNQVRQVREADVLRQKAYMLFYVRDRVGNPTPRKDNITANMPARRTIPEKISGLSDMIQSGVIEAKLNGSSSPYGDKRLHGISNGNSIKTSREHYLKKDGKTEAPKASENNGLASTQKASAPQIDGATLSAQSKQITSTGHREVSSSDRSASLTHVIVNQAVAMVPSQELQPKVDGLTDTSSLGNGNAILSERNKQTSQHQNPFSMPASHGKDTGAGLAAQTFPTKDAIVSNGVVPSSRDPISSEKVCGLQKSIKQDDKTVKELPISENNIVSGLERVNARKQTSSEVSMKVAAADSCNSNTPKRVDLKSKKLVRYPVMNMWLGPRQVMLGSLKVQKKKKCNRTRRRSVVCEDMANATCSGNNTSEQQASTSTTTSSETVQCTPRGRKRAYDSDSPKNNNQKQNKQDVIGADTGSGELNMDKRNVISETAASAELPKLGPGSSANQEHSRNNVHAKLGVPRHFTVLTRDLAEVTVPCWDDVAVSNAEARESKHSESKSIGYVLDEWDEEYDRGKTKKIRNSKEDYGGPNPFQEEANYISQRNMKQRTYQPKSWKKHAHVRR

SEQ ID NO: 147 - DNA, 492 bp, Oryza sativa
  CDS (1)..(492)
caggacacccgtcctctgcaagcccaacgtcgacgccatggaggaggccctcaggatcgccaacgtgaaccctcacaaggcgattttcttcgacgacagcgtgaggaacatccaggcggggaagaggatcgggctccacacggtgctggtgggcacgccgcagcgggtgaagggcgcggaccacgcgctggagagcatccacaacatcagggaggcgctgccggagctgtgggaggaggccgagaaggcggaggacgtgctcatctactccgaccgcgtcgccatcgagacatcggtgaccgcgtaggccacacctactgtctctcccgactccggcgaatcgctcagaacgagcaaccatccatccatccatgtccatccctggccgggcaggtgatcatcaggtgggaattcagaattggccgggacaacaatacgttccaagaaaaaaagaggagggtgttccgtggaagttcaggattcagaatgtaa

SEQ ID NO: 148 - protein, 163 aa, Oryza sativa
QDTRPLQAQRRRHGGGPQDRQREPSQGDFLRRQREEHPGGEEDRAPHGAGGHAAAGEGRGPRAGEHPQHQGGAAGAVGGGREGGGRAHLLRPRRHRDIGDRVGHTYCLSRLRRIAQNEQPSIHPCPSLAGQVIIRWEFRIGRDNNTFQEKKRRVFRGSSGFRM

SEQ ID NO: 149 - DNA, 753 bp, Oryza sativa
  CDS (1)..(753)
atggtctgcgtcgccatcgagtaccggatgcgccgggggcagcgtgacagggccccggcgtccgccgacgaggaaaggggaagtgacgggtcgtcttcatctagcgatgatgatgtcacggaggacgatcgccgtggtagctgcaccgattgcgtcagtattgcaaagcacctggagtcagctaatacaatgttctccttcatatggtggataattggattttattggatatctgctgggggtgaggatgttatccgtgatgcacctcagctttactggctttgcatagtctttctggcatttgacgtgttctttgttgtattctgtgttgctctggcttgcatcattggtattgctgtatgttgctgcctaccttgcattatagctattctctatgcggtttctgatcaggaaggagcgtcagaagatgatattcgccaaattccaagatacaaatttcggagaacagatgaacctgaaaaacaaactgctgatgagacaggaccttttggtggaataatgacagagtgtggcaccaatcaacctattgagaaagtactcgcacctgaagatgcggagtgttgcatttgcctttcggcatatgatgatggtgcagagctgcgtgaacttccttgtgggcaccatttccactgtgcctgcattgataaatggctgcatatcaacgcaacatgccccctgtgcaagttcaatatccggaaaagtggcagtagcagtggaagtgaagaagtatga

SEQ ID NO: 150 - protein, 250 aa, Oryza sativa
MVCVAIEYRMRRGQRDRAPASADEERGSDGSSSSSDDDVTEDDRRGSCTDCVSIAKHLESANTMFSFIWWIIGFYWISAGGEDVIRDAPQLYWLCIVFLAFDVFFVVFCVALACIIGIAVCCCLPCIIAILYAVSDQEGASEDDIRQIPRYKFRRTDEPEKQTADETGPFGGIMTECGTNQPIEKVLAPEDAECCICLSAYDDGAELRELPCGHHFHCACIDKWLHINATCPLCKFNIRKSGSSSGSEEV

SEQ ID NO: 151 - DNA, 3720 bp, Oryza sativa
  CDS (1)..(3720)
  misc_feature (956)..(956): Xaa at amino acid position 956 stands for Ser.
  misc_feature (961)..(961): Xaa at amino acid position 961 stands for Arg, or Lys.
  misc_feature (1086)..(1086): Xaa at amino acid position 1086 stands for Glu, or Asp.
  misc_feature (2868)..(2868): w is a or t
  misc_feature (2882)..(2882): r is a or g
  misc_feature (3258)..(3258): m is a or c
atggacgagtcaggcagaggaacaggtgatgatcatggccgggagacgaaggatgctgcggcggcggcgtcgtcgtcgtcggggaagaaggtgccgctgttcagcttgttccggtacgccgaccgcctcgacgtgctgctgatggttgtcggcacggtgggcgcgctcggcaacggcatctcgcagcccctcatgacggtcctcttcggcaacgtcatcaactccttcggcgcgaacaccagcggcagcgtcctccgcagcgtgaccaaggtgaaggtatcatgctggactatggcaggagaaaggcagtctgcccgcatccgttctttatacctgaaagccgttctgaggcaggatattacattcttcgacacagagatgacaactggtgaagcagtttctagaatgtctagtgataccctcctaattcaaggtgctcttggtgagaagggagggaagcttgtagaactgttatcaagcttcatcggtggctttatcatagcattcactagaggatggcttctcactcttgtcatgctaacatcgctaccgttaattgctattgccagtgcagtttctgcacaggccctaactagagtttctagcaagagacaaacatcatatagtgatgctggggacacagttgaacagaccattggatctataagaacagttgtgtccttcaatggtgagaagaaagcgatagcaatgtaccgtaattttataaagaagtcatacaaggctactattgaggaaggcattatcactggttttggcatgggctctgtcatgtgcgtcgtatttggcagctatggattagccttctggtatggtggaaagctaatcattgagaaaggttacacaggaggaaaaatcatgactatcttgtttgccgtgttgaccggcaatgcaacacctgcagttgctgcagttgtggaaggtcaatctgcagcatacaatttgttcaaaacaattgagaggaaaccagagatagattccgatgataacaatggcatggttttagaagatatgaatggcgatattgagctaaaggatgtgtactttcgttaccctgcaagaccagagcagttgatattggatggattgtcgttacaagtagcgagtggaacaacaatggctatagtcggagagagtggaagcggaaagtcaactgttatcagcctagtcgaaagattctacgatccacagtctggcgaagttttaatagatggaattagcatcaagaaactgagacttgattggataagagggaagatcggtcttgttagccaagagcctctgctttttatggcctccattaaagataacataatatatggtaaaaaagatgcaacgcttgaagagatcaagagagcagcggagcttgcaaatgcagctaacttcattgacaagttaccaaatggttatgatactttagttggccagcgcggtactcagctctctggaggacaaaaacagagaattgcaattgcaagagccatcctcaaagatccaaaaatccttttgctcgatgaagcaacaagtgcacttgatgtggagtctgagaggatagttcaggaggcactaaatagaatgatggtagaaagaaccacactcgttgtcgctcatcgtttgagcactgtgaggaatgttgattgcatcacagtcgtccgcaaaggaaaaatagttgaacaaggtcctcatgatgcactggtgaaggatcccgatggagcttactcccagctaattaggctacaagagactcatcgtgatgaaaggcataaactaccagattccagatcaaaaagtactagtttgtcattcagacgatcaagaactaaagattttctcagcaagagcaacaggtattccttcaagagccccttaggattgcctgttgatatacatgaggatggaatgacaagcgaacaacaaaaggttgaccactctgacagtaaggccattaaaaaaacaccatttggacggctttttaatcttaataagccagaagtgccagttcttttgttaggttctatagcagcatcagtgcatggagtcattttgccactatacggtataataatgccaggtgttctaaaatcattctatgaaccgccagatcagctgcgaaaagattctagattttgggcattgatgtctgttgttctgggggttgcttgtttgatttcaatcccagcagaatattttttgtttggaattgctgggggaaagcttatacagcgtgtccgtacactgtcatttcaaagaattatgcaccaagaggttgcttggtttgataagccctccaattccagtggggcacttggtacaaggctctcagtcgatgcgttgaatgtccgccgtttagtaggagataacctggcccttatagtccaggctgtagctacactaatcactggctttgccatagcttttgcggcagattggaggcttgcactgatcatcacttgtgtaattcctttagtgggtgcacagggctatgctcaagttaagttcttgaaggggttcagtgaagaatctaaggagatgtatgaggatgcaaaccaagttgcggctgacgctgtaggcagcatcagaactgtagcatctttctgttcagagaaaagagtggtggcaatatacaacaagaaatgtgaagctttaagaaaacagggaattcgaagcggaatcgttggagggattggcttaagtttctcaaacttgatgttatatctgacttacggtctttgcttctatgttggtgcaaagttcgtaagtcagggaaaaactactttttcagatgttttcaaagttttctttgctttagttttggcagccgttggtgtttcgcagtcaagtgcattgtcwactaatgcaacaarggcaagggattctgccatttccatttttagtattatcgatcggaagtctaggattgattcaagtagcgacgagggagcgataatggaaaacgtcactggcagcattgatttcaataatgtcagtttcaagtacccatcacgccctgatgttcaaatattcagtgactttaccttgcacattccttcccaaaagaccatagcacttgttggagaaagcggtagtgggaagtccacgataattgctttattagagcgtttctatgatcctgattctggtaatatctcactagatggagttgaaattagaagcttaaaagtcagctggttgagggatcagatggggcttgtaggccaggagccagtgcttttcaacgamacaatccgtgccaacataacatacgggaaacacagtgaggtaacagaggaagagatcactgctgtggccaaggcagcaaacgcccatgagttcgtatcaagcctgccacaaggatacgacacagtggtaggtgagaaaggggtgcaactatctggtgggcaaaaacagagggtagcaattgcaagggccatcctaaaggaccctaagatactgctacttgatgaggcaaccagtgctctagatgcagaatcagaacgtgttgttcaagatgcattggatcgagtcatggtcaacaggactaccattgtagtggcacaccgcctctccacaatcaaaggggctgatatgattgcagtcctcaaggaaggaaaaattgcagaaaaaggaaagcatgaagcactattgcggatcaaggatggtgcatatgcttcacttgtacaactccgctctaattccgagtaa

SEQ ID NO: 152 - protein, 1239 aa, Oryza sativa
  misc_feature (956)..(956): The 'Xaa' at location 956 stands for Ser.
  misc_feature (961)..(961): The 'Xaa' at location 961 stands for Arg, or Lys.
  misc_feature (1086)..(1086): The 'Xaa' at location 1086 stands for Glu, or Asp.
MDESGRGTGDDHGRETKDAAAAASSSSGKKVPLFSLFRYADRLDVLLMVVGTVGALGNGISQPLMTVLFGNVINSFGANTSGSVLRSVTKVKVSCWTMAGERQSARIRSLYLKAVLRQDITFFDTEMTTGEAVSRMSSDTLLIQGALGEKGGKLVELLSSFIGGFIIAFTRGWLLTLVMLTSLPLIAIASAVSAQALTRVSSKRQTSYSDAGDTVEQTIGSIRTVVSFNGEKKAIAMYRNFIKKSYKATIEEGIITGFGMGSVMCVVFGSYGLAFWYGGKLIIEKGYTGGKIMTILFAVLTGNATPAVAAVVEGQSAAYNLFKTIERKPEIDSDDNNGMVLEDMNGDIELKDVYFRYPARPEQLILDGLSLQVASGTTMAIVGESGSGKSTVISLVERFYDPQSGEVLIDGISIKKLRLDWIRGKIGLVSQEPLLFMASIKDNIIYGKKDATLEEIKRAAELANAANFIDKLPNGYDTLVGQRGTQLSGGQKQRIAIARAILKDPKILLLDEATSALDVESERIVQEALNRMMVERTTLVVAHRLSTVRNVDCITVVRKGKIVEQGPHDALVKDPDGAYSQLIRLQETHRDERHKLPDSRSKSTSLSFRRSRTKDFLSKSNRYSFKSPLGLPVDIHEDGMTSEQQKVDHSDSKAIKKTPFGRLFNLNKPEVPVLLLGSIAASVHGVILPLYGIIMPGVLKSFYEPPDQLRKDSRFWALMSVVLGVACLISIPAEYFLFGIAGGKLIQRVRTLSFQRIMHQEVAWFDKPSNSSGALGTRLSVDALNVRRLVGDNLALIVQAVATLITGFAIAFAADWRLALIITCVIPLVGAQGYAQVKFLKGFSEESKEMYEDANQVAADAVGSIRTVASFCSEKRVVAIYNKKCEALRKQGIRSGIVGGIGLSFSNLMLYLTYGLCFYVGAKFVSQGKTTFSDVFKVFFALVLAAVGVSQSSALXTNATXARDSAISIFSIIDRKSRIDSSSDEGAIMENVTGSIDFNNVSFKYPSRPDVQIFSDFTLHIPSQKTIALVGESGSGKSTIIALLERFYDPDSGNISLDGVEIRSLKVSWLRDQMGLVGQEPVLFNXTIRANITYGKHSEVTEEEITAVAKAANAHEFVSSLPQGYDTVVGEKGVQLSGGQKQRVAIARAILKDPKILLLDEATSALDAESERVVQDALDRVMVNRTTIVVAHRLSTIKGADMIAVLKEGKIAEKGKHEALLRIKDGAYASLVQLRSNSE

SEQ ID NO: 153 - DNA, 2625 bp, Oryza sativa
  CDS (1)..(2625)
atggcggcggcggagcagagcgcggagcagttcaggggccaggcgaggctcccggggttcgcggcgccccggcggtacgacctgcggctcgtccccgacctcgacgggtgcgccttcacgggatctgtggacgtctccgtcgacgtcacggcgcccaccaggttcctcgtgctcaacgccgccgagctcgaggtctcccccgggggcgtccagttcaagccccatggcgccgagcaggagctgcacccagcggaggttaccaatgtgccagaggatgagatcctgattatccgcttcaatgaggttcttcctgtaggggagggaactttagtaattgcattcaagggaactctgaacgacaagatgcatggcttctacagaagtgtgtatgaactcaatggggagaagaagaacatggcggtaacccagtttgaacctgctgacgcaaggcgttgttttccttgttgggatgagccctcttttaaggctatattcaaaattactctagaagttccgtctgagaccgttgcattgtcaaacatgccagtggttgaagagaaggtcaatggccttatcaaagctgtctattttcaagaaacaccaataatgtcaacatacctagtggctgttattgttggcatgttcgactatgtggaagctttcaccactgatggcactagggttcgtgtttacactcaagttggcaagagtgcccagggaaagtttgcactagaggttgctgtgaagacactggtcctcttcaaggagtattttgctgtgccatacccactcccaaaaatggacatgattgccattcctgattttgcctctggagcaatggagaactatggcttggttacatatcgtgaaacagctttgttatttgatgagaaacactctgcagctgcgaataagcaaagggttgcagttgtggtagcccatgaattagctcaccagtggtttggaaatcttgtgacgatggagtggtggacacacctatggcttaacgagggttttgcgacatgggtctcctacttagctgcagacaatttctttcctgaatggaatgtttggacccaatttcttgaggaatctacaacaggtttcaagttagatgcccttgcagggtcacatccaattgaggtcgacgtaaatcacgttgatgaaatagatgaaatatttgatgctataagctacaggaaaggagctgctgttattcggatgctgcaaagctatcttggggctgaaacttttcagaaatctctggccgcatacatcgaaaagttcgcatattcaaatgccaagactgaggacttgtgggctgcccttgaagaggggtctggtgaaccagtgaaaacattaatgcattcatggacaaagcagcaagggtaccctgttgttaatgtgaagctcaaggatggaaagctagagatggagcagacacagttcctatcaagcggggctgaaggagttgggcaatgggtggttcccatcacactgtgttgctgttcgtactcacgtcaagagaagttcctttttaatggaaagcaagaggattttaatttgtcagggcttgtagaatgtcaaaagaaagaagacttctggattaaacttaatgtcaatcagactggcttctatagagtgagctatgatgaggaacttgcatctcgacttagatatgcaattgaagccaacaaactgagtgcagcagacagatatggtgtacttgatgacacatatgccctctgtatggctggcaaacagaagctagtctccttattgcatttgattgctgcgtacaaggatgaaaccgagtatactgtgctcgccacaagtctgagcattgtcgagatggtggctgttgctgctcctgaggggttgggcaagctgaaaaagttcctgattgactttcttgagccatttgcacagagaattggttgggatgctaaaagcggtgagggtcacttggatgcattattgagaggtacacttttaactgctctggcagaacttggccatgaagctacaataaatgaagctgtacgccgatttaacatctttgtggaagatagagaaacaccactactccctccagatgttcgaaaggcggcatatgttgctttgatgcagacagtgaacaaatcaaacagagccggctatgaatcactattgaagatctataaagaaactgatctgagccaggaaaaagtcagaattttaggttctctagcatcttgccctgatcctgatgttgttcgtgatacactggacttcatgctgtcacctgaggtgaggaatcaggactctatatttttgcttagaggagtcggtgcagcgggacatgaggtggcatggacatggttgaaggaaaagtgggactacatttcagacaccttctctggaactcttctcacctatttcgtttccaccaccgtctcaccgctgcgcaccgatgaaatgggcgacgacgcggaggagttcttcaagagcaggacgaaggccaacatcgcgaggacggtgaagcagagcatcgagagagtgaggatcaatgccaaatgggtggagagcaccagggccgaggctaacctgggcaatgtcctcaaggaaatttctcacgaccactga

SEQ ID NO: 154 - protein, 874 aa, Oryza sativa
MAAAEQSAEQFRGQARLPGFAAPRRYDLRLVPDLDGCAFTGSVDVSVDVTAPTRFLVLNAAELEVSPGGVQFKPHGAEQELHPAEVTNVPEDEILIIRFNEVLPVGEGTLVIAFKGTLNDKMHGFYRSVYELNGEKKNMAVTQFEPADARRCFPCWDEPSFKAIFKITLEVPSETVALSNMPVVEEKVNGLIKAVYFQETPIMSTYLVAVIVGMFDYVEAFTTDGTRVRVYTQVGKSAQGKFALEVAVKTLVLFKEYFAVPYPLPKMDMIAIPDFASGAMENYGLVTYRETALLFDEKHSAAANKQRVAVVVAHELAHQWFGNLVTMEWWTHLWLNEGFATWVSYLAADNFFPEWNVWTQFLEESTTGFKLDALAGSHPIEVDVNHVDEIDEIFDAISYRKGAAVIRMLQSYLGAETFQKSLAAYIEKFAYSNAKTEDLWAALEEGSGEPVKTLMHSWTKQQGYPVVNVKLKDGKLEMEQTQFLSSGAEGVGQWVVPITLCCCSYSRQEKFLFNGKQEDFNLSGLVECQKKEDFWIKLNVNQTGFYRVSYDEELASRLRYAIEANKLSAADRYGVLDDTYALCMAGKQKLVSLLHLIAAYKDETEYTVLATSLSIVEMVAVAAPEGLGKLKKFLIDFLEPFAQRIGWDAKSGEGHLDALLRGTLLTALAELGHEATINEAVRRFNIFVEDRETPLLPPDVRKAAYVALMQTVNKSNRAGYESLLKIYKETDLSQEKVRILGSLASCPDPDVVRDTLDFMLSPEVRNQDSIFLLRGVGAAGHEVAWTWLKEKWDYISDTFSGTLLTYFVSTTVSPLRTDEMGDDAEEFFKSRTKANIARTVKQSIERVRINAKWVESTRAEANLGNVLKEISHDH

SEQ ID NO: 155 - DNA, 378 bp, Oryza sativa
  CDS (1)..(378)
acaaactccctggtgcaaatcagaagggcacttcgtgcccttgttgatgatcacacggatgggttgatggattttgaagatactgaagtgagatcttcggaggaaactgatgctttggaggaagctagattggcaatcgagcaagtagtgatcccaaaaggtgaaagcgtgcagctactgcccagaccaccaagcatcatcgcttcccaggtggatctagtcgaaagtttcaagctcaagtgggaatctataggccaggagccaaacgcatgcctcagaattcttccgcaattcgtaggcgtggaagaaggcggcaagtctgtcaagcaagaagctgcaactgagctcacagattcagacaattcagatgacatggac

SEQ ID NO: 156 - protein, 126 aa, Oryza sativa
TNSLVQIRRALRALVDDHTDGLMDFEDTEVRSSEETDALEEARLAIEQVVIPKGESVQLLPRPPSIIASQVDLVESFKLKWESIGQEPNACLRILPQFVGVEEGGKSVKQEAATELTDSDNSDDMD

SEQ ID NO: 157 - DNA, 528 bp, Oryza sativa
  CDS (1)..(528)
ccacgcgtccggacggtggcctcggcgcgcgacctcaagaacgtcaactggcgcaacggcgacctcaagccctacgccgtcgtgtggatcgacgacggcgccaagtgctccacccgcgtcgacctcgacaacgccgacaaccccacctgggatgacaagctcaccgtccctctcccgccctccacccgcctcgacgacgccgtcctctacctcgacgtcgtccacgccaacgccaccgacggcgtcaagcccctcgtcggctccgcgcgcctcccgctccgcgacgtcctcgccgacaccggcataggcgcccgagcctcccgctccctccgcctcaagcgcccctccggccgcccccatggacgcctcgaagtccgcgtcgccgtccgcgagcccaagcgctactacgacccctcgccggcgtaccctgctccctaccaccagcagacgaaccgtgacccctacgcctacggtaacactacaactggtggctatggctatgcctatggcggtacccctttcctataa

SEQ ID NO: 158 - protein, 175 aa, Oryza sativa
PRVRTVASARDLKNVNWRNGDLKPYAVVWIDDGAKCSTRVDLDNADNPTWDDKLTVPLPPSTRLDDAVLYLDVVHANATDGVKPLVGSARLPLRDVLADTGIGARASRSLRLKRPSGRPHGRLEVRVAVREPKRYYDPSPAYPAPYHQQTNRDPYAYGNTTTGGYGYAYGGTPFL

SEQ ID NO: 159 - DNA, 687 bp, Oryza sativa
  CDS (1)..(687)
atggcggaggcggaggcggggaggaaggagaagaaggaggtggtgcggctggagcgcgaatcggtgatccccatcatgaagcccaagctcatcatgaagctcgcctacctcatcgaacaacaatctgacagagaagaattcttgaagctctgcaagaggattgagtacaccattagggcctggtatcatctccagtttgatgatatgatggaactatttgctctttttgaccctgttcatggtgcccaaaaactgcaacagcagaatttctcgactgaggaagtcgatacactcgagcagaacttcctgacctatttctttcaggtgatgcaaaaaagcaatttcaacatattatcagatgatgaggttgagcttgctcattctggacaatatctgctgaatcttcccatcaaagttgatgaagcaaagttagataacaaacttttgtcaaagtattttaaagagcaccatcacgacaacctaccggagttctcagataagtatgtcatattccggaggggcattggactggatcgcactagcaactttttctttatggagaaagtggacatgatcatagctcgtgcgtggcgatggttcttggagaaaacaagactgcaaaagctcttctcaagaaagaaaagtgttaggccaaagacagattccaagaagaatgatgatctagtt

SEQ ID NO: 160 - protein, 229 aa, Oryza sativa
MAEAEAGRKEKKEVVRLERESVIPIMKPKLIMKLAYLIEQQSDREEFLKLCKRIEYTIRAWYHLQFDDMMELFALFDPVHGAQKLQQQNFSTEEVDTLEQNFLTYFFQVMQKSNFNILSDDEVELAHSGQYLLNLPIKVDEAKLDNKLLSKYFKEHHHDNLPEFSDKYVIFRRGIGLDRTSNFFFMEKVDMIIARAWRWFLEKTRLQKLFSRKKSVRPKTDSKKNDDLV

SEQ ID NO: 161 - DNA, 1167 bp, Oryza sativa
  CDS (1)..(1167)
  misc_feature (264)..(264): Xaa at amino acid position 264 stands for Arg.
  misc_feature (790)..(790): m is a or c
gagagagatatcagtatggttaacagttatcccccatctgcttttgattgcaaaggttggaattcagcatctattttcatttatgaatctgatgaggaaatccagtgccttcttgactggttaagagactatgacccaagggagaaggaactgaaagactctatcttgcagtggcaaagacatttctgtcatcaaagcagttctcctctcgttgatcctccaatttctggtccaaagggtgaacagcttatggagcttccaaataccaaggctgcagtaattttggaacaaaagtatggtctgcaattggaccaggacacaagtgatctaccgaaaaagcgaggaaagaagataaagttaagttctgaagatagaacatatcgctgcgactgtttggaacctgtatggccttctcgataccattgtttaacatgtcatgagacttatctcatatctacagagtttgaggggcataatgatggaaaatgcagtaaaatccaccagtctcctgatgaaagcagagaaaatgatgagccaaaagtgaaggttaccaaatctgatacgaaggaaaaagattcccttgaatgtagctctgtcattgaaccgtccagtgacagaaaattgatgcaatgcccatatgactttgaagaaatttgcagaaagttcgtcacaaatgattcgaacaaggagacagtaaagcagattggacttaatgggtccaatggagttccatcatttgtgccttcacctgcattttttcttgaacctgcaattgtacaaagtcaaaacmgaaaagatgatgaactcaaggattggacctcctctttagaggaatgcaatgcaatgtctgctcaaaagctagttcaagaggtttccaaatctggtcaaagttgtcctggcaatgtgggtgatgagaaggtgcaaaaatctaaaaagcccacccctgataatacttctggtgaggaagcacattctacaacaggcaagccaacacgattgctagctgttaatggggggttggttccagagtcatccttgaggcctcttataggacgaaactctcacatacttaagcagcaaaagataaacttgcttgacatcgaagcagccttgcctgaggaggcactgagagcctcaaagtgtcagcaaataagaaggcgttcatgg

SEQ ID NO: 162 - protein, 389 aa, Oryza sativa
  misc_feature (264)..(264): The 'Xaa' at location 264 stands for Arg.
ERDISMVNSYPPSAFDCKGWNSASIFIYESDEEIQCLLDWLRDYDPREKELKDSILQWQRHFCHQSSSPLVDPPISGPKGEQLMELPNTKAAVILEQKYGLQLDQDTSDLPKKRGKKIKLSSEDRTYRCDCLEPVWPSRYHCLTCHETYLISTEFEGHNDGKCSKIHQSPDESRENDEPKVKVTKSDTKEKDSLECSSVIEPSSDRKLMQCPYDFEEICRKFVTNDSNKETVKQIGLNGSNGVPSFVPSPAFFLEPAIVQSQNXKDDELKDWTSSLEECNAMSAQKLVQEVSKSGQSCPGNVGDEKVQKSKKPTPDNTSGEEAHSTTGKPTRLLAVNGGLVPESSLRPLIGRNSHILKQQKINLLDIEAALPEEALRASKCQQIRRRSW

SEQ ID NO: 163 - DNA, 728 bp, Oryza sativa
  CDS (1)..(726)
gttgaagctcagaagaaaattgaagctgcaattcggcagaaaggtattgatgaaaactgggaggctgccttggagcacaaccctgaagcatttgctcgagtggttatgctgtatgtggacatggaagtcaatggtgtacctttgaaggcctttgttgacagtggagcacaatcaactatcatatcaaaaagctgtgccgaacgttgcgggttgcttaggctgcttgatcagcgatatagaggtgttgctattggcgttggtcaatcagagattcttggtagaatacatgtagccccaataaagattggccatgtcttctatccttgttcattcacagtattggatgctcccaatatggaatttctttttgggcttgatatgctgcggaaacatcagtgcataattgacttaaaagacaatgttcttagagtaggaggtggtgaggtttcagtgcccttcttacaagagaaagacatcccttcacatatacgtgatgaagagaaactatcgaagctagcatctctcagccaaggagctgctggagaatcgtcaacggcacgggagaagactcctgatgcgccaccacgagctcctactacaggtgctccagctgtgaatcctccgcaaccacagggaggaggagatttcgaagcaaaagtcacgaaactggtggaacttggattcgaccgggcatccgtaatccaagctctcaagttgttcaacgggaa

SEQ ID NO: 164 - protein, 242 aa, Oryza sativa
VEAQKKIEAAIRQKGIDENWEAALEHNPEAFARVVMLYVDMEVNGVPLKAFVDSGAQSTIISKSCAERCGLLRLLDQRYRGVAIGVGQSEILGRIHVAPIKIGHVFYPCSFTVLDAPNMEFLFGLDMLRKHQCIIDLKDNVLRVGGGEVSVPFLQEKDIPSHIRDEEKLSKLASLSQGAAGESSTAREKTPDAPPRAPTTGAPAVNPPQPQGGGDFEAKVTKLVELGFDRASVIQALKLFNG

SEQ ID NO: 165 - DNA, 760 bp, Oryza sativa
  CDS (1)..(759)
gaatctggaatcttcaggcaaattcttagaggcaaacttgatttggaatctgatccgtggcctagtatatctgatagtgctaaagatctagtccgtaatatgcttatccgtgatcctacaaagagatttactgctcacgaggttctctgtcatccatggattgttgatgatgctgtggcacctgataagcctattgattctgctgttttgtcaaggctgaaacacttttctgcaatgaacaagctcaagaagatggctttgagggttattgctgaaagcctatctgaagaagagatcggaggtttgaaggaattgtttaaaatgatcgatactgacaatagtgggacgataacttatgatgaactgaagaatggcctgaaaagggtgggctcagatctaatggaaccagaaatccaggctttaatggatgccgctgatattgacaacagtggaaccatcgactatggtgaattcttagcagctactttgcacatgaataaactggagagggaggaaaacttggtgtcagcattcacgttctttgataaggatggaagtggcttcataaccattgatgagctctcgcaagcctgcgaacagtttggcctttctgatgttcatcttgaggatatgatcaaagatgtggatcaaaataatgatggacaaattgattacagcgagtttgccgcgatgatgagaaagggcaatgctggtggagccaatgctggtggagtcacttctactggtggaacaggaagga

SEQ ID NO: 166 - protein, 253 aa, Oryza sativa
ESGIFRQILRGKLDLESDPWPSISDSAKDLVRNMLIRDPTKRFTAHEVLCHPWIVDDAVAPDKPIDSAVLSRLKHFSAMNKLKKMALRVIAESLSEEEIGGLKELFKMIDTDNSGTITYDELKNGLKRVGSDLMEPEIQALMDAADIDNSGTIDYGEFLAATLHMNKLEREENLVSAFTFFDKDGSGFITIDELSQACEQFGLSDVHLEDMIKDVDQNNDGQIDYSEFAAMMRKGNAGGANAGGVTSTGGTGR

SEQ ID NO: 167 - DNA, 567 bp, Oryza sativa
  CDS (1)..(567)
gtctccttcccttactccccacggccggccgcgttggctgcaggcgctcgggcctcgcgggttagccccgtcgtggtcgccgccggcggcgggcaccagcggcttatggggtcgttgactaacacccaggggctcaggtttggagtggttgtggcacggttcaatgagattgtcaccaacttgctactgcagggagctcttgagacatttgagagatattccgtcaaaaaagaaaatataacagttctaagtgttcctggcagttttgaaattcctgttgcggcacaaaagcttgggaagtctggaaagtttgatgccaattttgtgcattggcgctgtgcattcagaggtgacacaacccactacggtgctgttgcaaactctgctgcttcaggtgtactgtctgctggattgtctgctgagatcccatgcatatttggtgttctgacatgtgatgacatggaccaggctctaaatcgtgctggtggtaaggctggaaacaagggagctgaagccgctctaactgcaatcgagatggcctcgctgttccagcatcacctggcctga

SEQ ID NO: 168 - protein, 188 aa, Oryza sativa
VSFPYSPRPAALAAGARASRVSPVVVAAGGGHQRLMGSLTNTQGLRFGVVVARFNEIVTNLLLQGALETFERYSVKKENITVLSVPGSFEIPVAAQKLGKSGKFDANFVHWRCAFRGDTTHYGAVANSAASGVLSAGLSAEIPCIFGVLTCDDMDQALNRAGGKAGNKGAEAALTAIEMASLFQHHLA

SEQ ID NO: 169 - DNA, 509 bp, Oryza sativa
  CDS (1)..(507)
ggaaggaagcctgttgcggcccaacattacaacaagggtgataaagatggaacaagcactggcagccgatgcacttctgttgcatgggtaccggagcgtgaaggaatctttgttgttagccattctgatggaaatctgtatgtgtacgataaatgcaaagatggaaacactgagtgtacattcccagctataaaggatccggctcagttaatgatttcacatgcaaagtccagcaagagcaacccaattgctagatggcatgtttgccaaggttcaatcaacgccatctccttttcaccagatggagcatatttagcaactgttgggcgagatggttatttgagagtgtttgacttttcgaaggagcaactaatatttggtgggaaaagttattatggtgcactattgtgttgcacatggagctcggatggcaaatatctgttgactggtggtgaagatgatcttgtgcaggtatggagcatggatgacagaaagatagtcgcgtgggg

SEQ ID NO: 170 - protein, 169 aa, Oryza sativa
GRKPVAAQHYNKGDKDGTSTGSRCTSVAWVPEREGIFVVSHSDGNLYVYDKCKDGNTECTFPAIKDPAQLMISHAKSSKSNPIARWHVCQGSINAISFSPDGAYLATVGRDGYLRVFDFSKEQLIFGGKSYYGALLCCTWSSDGKYLLTGGEDDLVQVWSMDDRKIVAW

SEQ ID NO: 171 - DNA, 714 bp, Oryza sativa
  CDS (1)..(714)
atgctggtgcagcgcagggacggcgacacgggtccggccgtcaggctcagggtctcccacggcgcctccttccgcgacgtcgccgtgccggcgcactccaccttcggtgaattgaagggggtccttacccaggcaactggcgtagagcctgaaaggcagaggctcttcttccgtgggaaggagaagagtgacaatgagttcctgcatacagctggggtcaaggatggagcaaaacttcttctacttgagaagcctgcccctgccaatgtagagcagagggccgagccagtaattatggatgagagcatgatgaaggcttgtgaggctgttggccgtgtaagagctgaagttgacagactctctgccaaggtatgtgatttggagaagagtgtgtttgcagggagaaagattgaggataaagattttgttgtcttgacggagcttcttatgatggagctgctgaaacttgatggcatagaggcagagggagaagcaagggcacaaaggaaggctgaggtacgccgtgtccaaggtcttgtggagacgttggataagctgaaggcaagaaatgccaatcccttcagcgatcaaaacaaatctgtttcagtgacaacgcagtgggagacgttcgacaatggcatgggcagcttgaatgcacccccaccacgggtttcttccacacaaataaacaccgactgggagcaattcgactag

SEQ ID NO: 172 - protein, 237 aa, Oryza sativa
MLVQRRDGDTGPAVRLRVSHGASFRDVAVPAHSTFGELKGVLTQATGVEPERQRLFFRGKEKSDNEFLHTAGVKDGAKLLLLEKPAPANVEQRAEPVIMDESMMKACEAVGRVRAEVDRLSAKVCDLEKSVFAGRKIEDKDFVVLTELLMMELLKLDGIEAEGEARAQRKAEVRRVQGLVETLDKLKARNANPFSDQNKSVSVTTQWETFDNGMGSLNAPPPRVSSTQINTDWEQFD

SEQ ID NO: 173 - DNA, 411 bp, Oryza sativa
  CDS (1)..(411)
acctcctcaggagatcagcagatggtgacggtggcggagaggttcccgcgggaggtgagctcggaggcggtgttccggtgcgtgcggctggggccggtcgaccaggccgaggcggaggtcgcgtaccagacggccgtcagcatcggcggccacgtgttcaagggcatcctgcacgacgtcggccccgaagccctggcggtcgccggcggcggcggcgccagcgagtaccacttccgcctcaccggcgacgggtcctcgccgagcaccgccgcggccggcgaggcaggctccggcggcggcggcaacatcatcgtgtcatcggctgtggtgatggacccgtacccgacgcccgggccctacggcgcgttccccgccggcacgccattcttccacggccacccgcggccgtga

SEQ ID NO: 174 - protein, 136 aa, Oryza sativa
TSSGDQQMVTVAERFPREVSSEAVFRCVRLGPVDQAEAEVAYQTAVSIGGHVFKGILHDVGPEALAVAGGGGASEYHFRLTGDGSSPSTAAAGEAGSGGGGNIIVSSAVVMDPYPTPGPYGAFPAGTPFFHGHPRP

SEQ ID NO: 175 - DNA, 982 bp, Oryza sativa
  CDS (1)..(981)
atggagttcgaggcggacggcgcccggtggccggagccgcgaggcgacgctgccggggcgccgccgctggagcgtggcgatgcgccttcccctcgcttcgattcgtctcgtgccctaagattgctgagagagcttggctcaaatgtaacagaagatttggttgtgctgatgccaaatttgctatcatttctgaaacatgatgatcctgtggttgttaatcaatccatagctagtgggacaaatttatttgctgctgtattggaagagatgacacttcagattaataagtgtggaagggttgatgcttggcttgaagagatgtgggcttggacgaagcagtttaaagatgcagtccataatctgatccatgagtctgtcccagttgctactaaactgtttgctgtaaagttcattgaaacatggatcctgtgtttcgcacctcaatccaaaagtgaccggatgcagccaactgaaggaaggaacaggaggttgtttgatagttcaagattatctcaattccatcccagccttaaccctgctgttctcgaagctgatgcaaacagggctctcatcctccttgtggatatactgcagtcagcttgtgctcatcaaggatccttcctagttggcaccattaattctcttgcagctattgcaaagaatagacctgtttactacgaacgcatactgccagtgctacttggttttgaccctagtttggaggttgcaaaaggagctcatcctgcaagtctgcggtattccctgaaaacagcttttttagggtttctaaggagtccttgccaggcaatgattgagtccaaggatactctggtaaggcagcttcgtgttctgagccctggtgaagcaacagaacagattattaggcaagtagagaagatgactagaaatattgagcgcgcttctcgtgctagcaaggatgaaccttcaacgttggatatgccttacggagatgttagtcgga

SEQ ID NO: 176 - protein, 327 aa, Oryza sativa
MEFEADGARWPEPRGDAAGAPPLERGDAPSPRFDSSRALRLLRELGSNVTEDLVVLMPNLLSFLKHDDPVVVNQSIASGTNLFAAVLEEMTLQINKCGRVDAWLEEMWAWTKQFKDAVHNLIHESVPVATKLFAVKFIETWILCFAPQSKSDRMQPTEGRNRRLFDSSRLSQFHPSLNPAVLEADANRALILLVDILQSACAHQGSFLVGTINSLAAIAKNRPVYYERILPVLLGFDPSLEVAKGAHPASLRYSLKTAFLGFLRSPCQAMIESKDTLVRQLRVLSPGEATEQIIRQVEKMTRNIERASRASKDEPSTLDMPYGDVSR

SEQ ID NO: 177 - DNA, 1257 bp, Oryza sativa
  CDS (1)..(1257)
atggtcgaggtggaggaagtcagcaacaagatgcaggcgcagatgcgcctccaccccgcggcggcggcggaggaggaggacgccgacctcccgctccctgccctcttcgacaaggcgtcccacctccactccctcgcctccagctcctccctcgatcaggaagggatccgcaagggggtcgacctgctgcggcggtgcgacgagatggtcagtaagctcggcctcttctcctccaacgagaccaaggatgacgtctccactgccaacctcaaatacctactcgtgccgtactaccttggggaaatgactgaaagggtagcgcaggaagatcggatcccagtccttaaggcgtcgcaggatcatttgaaggaattcatttctatctgtgaagcactggagcttatatcagaggatgagcttgaattgtctaggcagaagcaacctgataccatggcaaatcgaagagcacagaaggctgcacggttcaagcgccaaaaggctgcagaaacaaagctcctagaaatcaaggagaggaaagaaaggcgtaggcggtcattgagagcagctgctttatcagctcctattgaagctggggaggaagatgcttttgaggatgatggagaggaagaaagagaggcatggttagctactatctcattggctctatgcaaggcttttgaccttcttgacatgttaaagaaggaagaagaaatgcttctggcagtaaaagaaaggcaagcgaaggatggtaatgcatttgctcgtgaaatgcttgatgaacgtacaaaaaaggctgaagcatggcaccataatgctgccaaccgtgcaccatattccaagccagctgatccaatcacttgtgcaacatttgctcaagatgtcattgaaggtagagcaagtgtttcacaagcacatgagcacaaacaccagccgctgatatttggccctgcaagtcttgttggtggaggactaaccagtgaaagagagagaatggcagcacaagtttttcagccaagttacaggttgccaacgatgagcatagaagaagctggcttacgtgagatgaaaatgatggagaaatggcaagaaagaactgctaagatgattcaagaatcaaactccgcatggcacaaggatggcagtcggtcagcccaagaggatgaggacgctgaagaggagaaagcaagagcatgggatgactggaaggacgataaccctcgtggtgcaggcaacaagaagctcactccctgtggctag

SEQ ID NO: 178 - protein, 418 aa, Oryza sativa
MVEVEEVSNKMQAQMRLHPAAAAEEEDADLPLPALFDKASHLHSLASSSSLDQEGIRKGVDLLRRCDEMVSKLGLFSSNETKDDVSTANLKYLLVPYYLGEMTERVAQEDRIPVLKASQDHLKEFISICEALELISEDELELSRQKQPDTMANRRAQKAARFKRQKAAETKLLEIKERKERRRRSLRAAALSAPIEAGEEDAFEDDGEEEREAWLATISLALCKAFDLLDMLKKEEEMLLAVKERQAKDGNAFAREMLDERTKKAEAWHHNAANRAPYSKPADPITCATFAQDVIEGRASVSQAHEHKHQPLIFGPASLVGGGLTSERERMAAQVFQPSYRLPTMSIEEAGLREMKMMEKWQERTAKMIQESNSAWHKDGSRSAQEDEDAEEEKARAWDDWKDDNPRGAGNKKLTPCG

SEQ ID NO: 179 - DNA, 963 bp, Oryza sativa
  CDS (1)..(963)
gtgctggagacgctgatcggcggtgaccacttctcggaggaggaggcggaggcgacgctgcggctgctgctggaggaggagaacgaggcgcgcatcgccgccttcctcgtgctcctcagggccaagggcgagacctacgaagagatcgtggggttggcgaaggcgatgataggctgctgcgtccgggtcgacgggctcgatgacgccgtcgacattgtcggcaccggcggggacggcgcggacaccgtcaacatctccaccggctccaccatcctcgccgccgcggcgggtgccaaagtcgccaagcaagggagcagagctagctcgtcggcctgcggcagcgccgatggtattaaacgatgtgtcaatgaggtgggtgttggattcatgatgtctgcaaactatcatccagcaatgaaaatcgtgaaacctgtgaggaagaagctgaaaataaagacagttttcaatatccttggtcctctcttaaatccagcaagggtgccttatgctgttattggtgtttaccacgagaacatagttaccaagatggctaaggcagctcagaaatttggaatgaagagagcattggttgtccattcgaagggtttggatgaaataagcccacttgggcctggatatatccttgatgtcacaccaagaaagattgaaaaaatgctcttcgatccattggattttggtataccccgctgcacgctggaagatctaaaaggaggtgatccagcgttcaacgcaaaagttctccaggatgttcttgctggtcaaagaggttcaattgctgatgctctcgtgctgaatgctgcagcatctcttcttgtcagtggtaaagtaaatactttgcatgatggtgtagcgttagcacaggaaacacaacgctccggggaggccatcaacacacttgaatcctggataaagatttccaatgtaagtacttctgataattaa

SEQ ID NO: 180 - protein, 320 aa, Oryza sativa
VLETLIGGDHFSEEEAEATLRLLLEEENEARIAAFLVLLRAKGETYEEIVGLAKAMIGCCVRVDGLDDAVDIVGTGGDGADTVNISTGSTILAAAAGAKVAKQGSRASSSACGSADGIKRCVNEVGVGFMMSANYHPAMKIVKPVRKKLKIKTVFNILGPLLNPARVPYAVIGVYHENIVTKMAKAAQKFGMKRALVVHSKGLDEISPLGPGYILDVTPRKIEKMLFDPLDFGIPRCTLEDLKGGDPAFNAKVLQDVLAGQRGSIADALVLNAAASLLVSGKVNTLHDGVALAQETQRSGEAINTLESWIKISNVSTSDN

SEQ ID NO: 181 - DNA, 936 bp, Oryza sativa
  CDS (1)..(936)
atggcgacgcggctgctgtgttggacggcgctcctcctccccatcatcgccgccaccgccgccgcctcgccgcttcccgaggcgtgcccggtgcctactgcggcggaggaaatccttgggcctggcggcacatgcacgacgctggatcgccgcggcgaccctgtcggcgtcatcgagggggatgaggtaacattggcgaaggccattactcttcttcacatgaacaaagatgattacattgctgtactcttctatgcttcctggtgcccattctcacaagaatgcaagccaaattttgagatattagcatctttgttcccatctattcggcattttgcgtttgaagaatcctcaatcaggccaagtataatatcaagatatgggattcatggttttccaacactatttctcttgaattcaactatgcgagtgcggtatcatggaccacggactgttaagtccctggctgctttctaccgtgatgtttcaggtttcgatgtttcaatgacgtcagaggccgtgctacattcagtagatggtattgagcttaagaaggatgctgaacaggaaaattgtccattctggtgggcacgctcaccggagaaaatacttcagcaggatacttatctagcactggcaactgcatttgtaatcttgaggttactgtatcttctctttccaaagataggttccttcgccaaacgggcgtggaggaggcatactctttttccaaacttggtgggtgtgcatgaatatttcttcacctaccttgaacaagcaagacacaaattctttaggttatacccttcgaagcgagggaatttacaggaaggggccaggaatgccactgcttgggcttccaagtcattagcatccgtctcaatcggagaaccaagcactattggaaggacaaactctacaaatgagctaagataa

SEQ ID NO: 182 - protein, 311 aa, Oryza sativa
MATRLLCWTALLLPIIAATAAASPLPEACPVPTAAEEILGPGGTCTTLDRRGDPVGVIEGDEVTLAKAITLLHMNKDDYIAVLFYASWCPFSQECKPNFEILASLFPSIRHFAFEESSIRPSIISRYGIHGFPTLFLLNSTMRVRYHGPRTVKSLAAFYRDVSGFDVSMTSEAVLHSVDGIELKKDAEQENCPFWWARSPEKILQQDTYLALATAFVILRLLYLLFPKIGSFAKRAWRRHTLFPNLVGVHEYFFTYLEQARHKFFRLYPSKRGNLQEGARNATAWASKSLASVSIGEPSTIGRTNSTNELR

SEQ ID NO: 183 - DNA, 834 bp, Oryza sativa
  CDS (1)..(834)
atggccatgaagggacccggcctcttctccgacattggcaagagggccaaggatctgctcaccaaggactacacctatgaccagaagctgaccgtctccaccgtcagctcctccggagtgggcctcacttccacagctgtgaagaaaggggggctttatactcttgatgtcagctcagtttacaagtacaagagtactctcgtcgatgtcaaagtggacacagaatctaatatctctactactttgactgtgtttgatgtccttccatccacaaagcttgtgacaagtgtcaagctgcctgactacaattctggaaaggtggagatgcaatacttccatgagaatgcaagttttgccactgctgttggcatgaagccatctcctgtggttgaattttctggaacagctggtgctcaaggacttgcctttggtgcagaagctgggtttgacactgctacaggaaaatttaccaagtacagtgctgcgataggtgtaaccaagccagattatcatgctgcaatcgttctggcggacaaaggtgacaccgttaaagtgtcaggtgtatatcaccttgatgataagcagaaatcctctgttgttgctgaattaacccgcaggctctcaacaaatgagaacactctcactgttggtggcctgtacaaggttgaccccgagacagctgtgaaggcaaggctcaacaacactggaaagcttgctgctcttctccagcatgaggttaaacccaagtcggttttgacaatctctggtgaattcgacaccaaggccttggacagaccccccaagtttggtctagcgcttgcactcaggccctga

SEQ ID NO: 184 - protein, 277 aa, Oryza sativa
MAMKGPGLFSDIGKRAKDLLTKDYTYDQKLTVSTVSSSGVGLTSTAVKKGGLYTLDVSSVYKYKSTLVDVKVDTESNISTTLTVFDVLPSTKLVTSVKLPDYNSGKVEMQYFHENASFATAVGMKPSPVVEFSGTAGAQGLAFGAEAGFDTATGKFTKYSAAIGVTKPDYHAAIVLADKGDTVKVSGVYHLDDKQKSSVVAELTRRLSTNENTLTVGGLYKVDPETAVKARLNNTGKLAALLQHEVKPKSVLTISGEFDTKALDRPPKFGLALALRP

SEQ ID NO: 185 - DNA, 1254 bp, Oryza sativa
  CDS (1)..(1254)
atgttcgggcgcgcgccgaagaagagcgacaacaccaagtactacgagatcctgggggtccccaagaccgcctcccaggacgacctcaagaaggcgtaccgcaaggccgccatcaagaaccaccccgacaagggcggcgaccccgagaagttcaaggagcttgcacaagcttatgaggtattgagtgacccggagaaacgtgaaatctatgaccaatatggtgaagatgccctcaaggaaggaatgggtggaggcggatcccatgttgatccatttgacatcttttcatcattctttggaccttcttttggtggtggtggcagcagcaggggcagaaggcaaaggaggggagaggatgtgatccatccgcttaaggtttctctagaagatctttacaatggtacttcaaagaagctctctctttcccgcaatgtcctctgcgccaagtgcaagggcaagggttccaagtctggtgcttccatgaggtgcccaggttgccaggggtctggcatgaaaatcaccatccgccagctggggccttccatgatacagcagatgcagcagccttgcaatgagtgtaaggggactggagagagcattaatgagaaggatcgctgcccaggctgcaagggcgagaaggttattcaggagaagaaggttctggaggttcacgttgagaaggggatgcaacacaatcagaagatcactttccctggtgaagctgatgaggcgcctgataccgttacgggagacattgtattcgtcctccagcagaaggaccactccaagttcaaaaggaagggcgatgatctcttttatgagcacaccttatctctgactgaagcactttgtggtttccaatttgtcctgacacatctggacaacagacagctgctcattaagtcaaaccccggtgaagttgttaagcctgaccaattcaaggcaataaacgatgagggaatgccaatgtaccagaggcctttcatgaaggggaagctctacattcatttcacggtggagttccctgattccctggcgcctgaacaatgcaaggctctcgaggctgtgcttccaccgaagcctgcatcccagctgacagaaatggagatagatgaatgcgaggagaccacgatgcacgatgtcaacaacattgaggaagagatgcgcaggaaagcccaagctgctcaggaggcgtatgatgaggacgatgagatgcctggaggtgcccagagagttcagtgcgcgcaacagtaa

SEQ ID NO: 186 - protein, 417 aa, Oryza sativa
MFGRAPKKSDNTKYYEILGVPKTASQDDLKKAYRKAAIKNHPDKGGDPEKFKELAQAYEVLSDPEKREIYDQYGEDALKEGMGGGGSHVDPFDIFSSFFGPSFGGGGSSRGRRQRRGEDVIHPLKVSLEDLYNGTSKKLSLSRNVLCAKCKGKGSKSGASMRCPGCQGSGMKITIRQLGPSMIQQMQQPCNECKGTGESINEKDRCPGCKGEKVIQEKKVLEVHVEKGMQHNQKITFPGEADEAPDTVTGDIVFVLQQKDHSKFKRKGDDLFYEHTLSLTEALCGFQFVLTHLDNRQLLIKSNPGEVVKPDQFKAINDEGMPMYQRPFMKGKLYIHFTVEFPDSLAPEQCKALEAVLPPKPASQLTEMEIDECEETTMHDVNNIEEEMRRKAQAAQEAYDEDDEMPGGAQRVQCAQQ

SEQ ID NO: 187 - DNA, 864 bp, Oryza sativa
  CDS (1)..(864)
atggcggccatatcttcgcttcccttcgcggcactgcgccgggccgccgactgcaggccgtcgacggcggcggcggcggcgggggcgggggcgggggccgtcgtgctcagcgtgaggccccggcgggggtcgcgctcggtggtgcgctgcgtcgccacggcgggcgatgttccacccactgtcgcagaaacaaagatgaattttctcaagtcatacaagcgtcctatcctaagcatttacagtacagttctacaagaacttttggtacagcaacatctgatgagatacaaaacaacatatcaatatgatgcggtgtttgctcttggttttgtgaccgtctatgaccaactcatggaagggtaccctagcaatgaggatagggatgcaatcttcaaagcatatataacagcgttaaacgaagaccctgagcaatacagagctgacgcacaaaagatggaagagtgggctcgttcccagaatggtaattctttagttgagttttcatccaaagatggagaaatagaggccattctgaaagatatttcagaaagggcccagggtaagggaagcttcagctacagccggttctttgcagttggcttgttccgtttgcttgagcttgcaaatgcaacagagccaaccatactagacaagctttgcgctgctctaaacatcaacaaaagaagtgtcgacagggatctcgatgtttaccggaacatactctccaaattggtccaggctaaggaacttctcaaggaatacgtggaaagggaaaagaagaagagagaggaaagatcagagaccccaaaatcgaatgaagctgttacgaaatttgacgggagtctcaattccatgaggcattaa

SEQ ID NO: 188 - protein, 287 aa, Oryza sativa
MAAISSLPFAALRRAADCRPSTAAAAAGAGAGAVVLSVRPRRGSRSVVRCVATAGDVPPTVAETKMNFLKSYKRPILSIYSTVLQELLVQQHLMRYKTTYQYDAVFALGFVTVYDQLMEGYPSNEDRDAIFKAYITALNEDPEQYRADAQKMEEWARSQNGNSLVEFSSKDGEIEAILKDISERAQGKGSFSYSRFFAVGLFRLLELANATEPTILDKLCAALNINKRSVDRDLDVYRNILSKLVQAKELLKEYVEREKKKREERSETPKSNEAVTKFDGSLNSMRH

SEQ ID NO: 189 - DNA, 2379 bp, Oryza sativa
  CDS (1)..(2379)
atggagaaggatcaccagcccgtcatcagcttgcgccccggcggcggcggcggcggcccccgccccggccgcctcttctcccccgccttcgccgccgccgcctccggctccggcgacttgctccgctcccacgtcggcggcgcatccaagattggtgatccaaattttgaggtgcgcgagcgtgttcgctatacaagagatcaacttctcgagctgcgtgagatcgttgacatacctgaggccatcttaattaagcaagagattgatatagagcttcatggtgaagatcagatttggggtcgccctgagtcagatgtgcaagtgcagacacaaacccaggcgcaaccgcacaatcggtatggtgagacagataaccgtgactggcgtgcacgcacggttcaacctccggcagctaatgaagagaagtcctgggacaacattcgtgaagctaaagcagcacatgcttcaagtggtcggcaacaagagcaagttaacaggcaggatcaattaaaccaccagtttgcttcaaaagctcaggttggcccgactcctgctcttatcaaggctgaggtaccttggtcagctagaagaggcaatctctcagagaaagatagagtcctgaaaacagtgaaaggtatactaaacaaactgacaccggagaaatttgatctactcaagggccaactaatggaatctggaattaccactgctgatattctaaaggatgttatttctctcatatttgagaaggctgtttttgagcccaccttctgtccgatgtatgctcaactttgttccgatctcaatgagaagctaccatcattcccttcggaagaaccaggtggcaaagagattacgttcaagcgcgtgctgttgaacaattgtcaggaagcatttgaaggcgctgagagcctaagggctgaaatagcaaaattgactggccctgaccaagagatggagagaagggacaaagaaaggattgtcaaactaagaacacttggaaatatccgtctaattggtgagctacttaagcaaaagatggtacctgaaaagatagttcatcacattgttcaggaactcttggggtctggacctgataaaaaggcttgccctgaagaggaaaacgttgaggctatttgtcagttcttcaatacaattggtaaacagcttgacgagaacccaaaatctcgtcgaattaatgatacctacttcattcagatgaaggagttaacaacaaaccttcagttggcaccacgtctgaggtttatggttcgtgatgtggttgatcttcgttcaaacaattgggtgcctcgacgtgaagagattaaggccaagacaatcagtgaaattcatgatgaggctataaagacacttggactacggccaggggcaacaggactcacgaggaatggccgtaatgcaccaggtggtcctctttcccctggtggattcccaatgaatcgaccaggaacaggagggatgatgcctgggatgcctggaacacctggtatgcctggatcaagaaagatgcctggaatgcctgggttagataatgataactgggaagttccacgttctaaatcaatgccaagaggcgactctcttcgtaaccagggtccgttgcttaataagccatcatctattaacaagccatcatctattaactccaggcttcttcctcatggaagtggagcactaattggtaagagtgctcttttgggcagtggtggtccaccatctcgcccttccagccttatggctagtcccactcatacaccagctcaaactgcaccatcaccaaaacctgtaagtgcagctccagctgttgtgcctgtcacagacaaagcagccggttcttcccatgagatgccagctgcagttcagaagaagacggtatcccttcttgaagagtattttggcatacgtattctggatgaagcacaacaatgtatcgaggagcttcagtgtcctgagtactactctgagattgtgaaagaagctatcaatcttgctctggataagggtcccaacttcattgatccccttgttaggctgctggagcatctgcacaccaagaaaattttcaagactgaggacctgaaaactggatgcttactgtatgcagccctgctggaagatattggtattgaccttcctctagctccagccttgtttggtgaagttgttgcacgactgagtttgtcgtgtagcttgagctttgaagttgttgaggagattctaaaagcagtggaggatacatacttccgcaaaggaatttttgatgctgtcatgaaaaccatgggtggaaactcttcaggtcaggctatcttgagctcgcatgctgtggtaatcgacgcctgcaacaaacttctgaaataa

SEQ ID NO: 190 - protein, 792 aa, Oryza sativa
MEKDHQPVISLRPGGGGGGPRPGRLFSPAFAAAASGSGDLLRSHVGGASKIGDPNFEVRERVRYTRDQLLELREIVDIPEAILIKQEIDIELHGEDQIWGRPESDVQVQTQTQAQPHNRYGETDNRDWRARTVQPPAANEEKSWDNIREAKAAHASSGRQQEQVNRQDQLNHQFASKAQVGPTPALIKAEVPWSARRGNLSEKDRVLKTVKGILNKLTPEKFDLLKGQLMESGITTADILKDVISLIFEKAVFEPTFCPMYAQLCSDLNEKLPSFPSEEPGGKEITFKRVLLNNCQEAFEGAESLRAEIAKLTGPDQEMERRDKERIVKLRTLGNIRLIGELLKQKMVPEKIVHHIVQELLGSGPDKKACPEEENVEAICQFFNTIGKQLDENPKSRRINDTYFIQMKELTTNLQLAPRLRFMVRDVVDLRSNNWVPRREEIKAKTISEIHDEAIKTLGLRPGATGLTRNGRNAPGGPLSPGGFPMNRPGTGGMMPGMPGTPGMPGSRKMPGMPGLDNDNWEVPRSKSMPRGDSLRNQGPLLNKPSSINKPSSINSRLLPHGSGALIGKSALLGSGGPPSRPSSLMASPTHTPAQTAPSPKPVSAAPAVVPVTDKAAGSSHEMPAAVQKKTVSLLEEYFGIRILDEAQQCIEELQCPEYYSEIVKEAINLALDKGPNFIDPLVRLLEHLHTKKIFKTEDLKTGCLLYAALLEDIGIDLPLAPALFGEVVARLSLSCSLSFEVVEEILKAVEDTYFRKGIFDAVMKTMGGNSSGQAILSSHAVVIDACNKLLK

SEQ ID NO: 191 - DNA, 1021 bp, Oryza sativa
  CDS (1)..(1020)
ccacgcgtccgctgtcgcctctgctcctcctcctcctgctccatctcctcctccatatcccactcgccaatctcgattccctcctccgctctacctcgccggagttcaccctgtgtgggactgggagcggcggcggcgtcggaggcaatggacgcttcgtcggtggcgctctacggccagctcaaggctgctcaaccattcttcttgttagctgggcctaatgtgattgaatcagaggagcatgtcctgaagatggcaaaacacatcaaaggcatcacaaccaagcttggtctgccacttgtgttcaagtccagctttgataaagcaaatcgtacatcatcaaaatccttccgtggtcctggtctggaggaaggcctgaagatacttgaaaaagtgaaagcaacatatgacattccagtggtcactgatgtgcatgaaagccaccagtgtgaagccgccggaagagtggccgacatcatacaaattccagctttcttctgtcgccagactgatcttctagtggctgctgccaagactggaaaaattatcaacatcaagaaaggacaattctgtgctccttctgttatggccaactctgcagagaaaatcagacttgctggaaatcaaaatgttatggtctgtgagcgtggcaccatgtttggctacaatgatctaattgttgatccaaggaattttgagtggctgagagaagctaattgtccagttgtagctgatgtaacgcatgctctacaacagcctgctggaaaaaagcttgatggtggaggtgttgcaagtgggggcttacgagaactaataccatgcatcgcaaggacttctgttgctgtcggagttgatggtattttcatggaggtacatgatgatcccttgaacgcaccttgtgatggcccaactcaatggccactgcgcaatttggaggagctattagaggagctgattgcaattgctcgagtcaccaagggaaagaagccactcaagatcgatctcacccccttcaaagaat

SEQ ID NO: 192 - protein, 340 aa, Oryza sativa
PRVRCRLCSSSSCSISSSISHSPISIPSSALPRRSSPCVGLGAAAASEAMDASSVALYGQLKAAQPFFLLAGPNVIESEEHVLKMAKHIKGITTKLGLPLVFKSSFDKANRTSSKSFRGPGLEEGLKILEKVKATYDIPVVTDVHESHQCEAAGRVADIIQIPAFFCRQTDLLVAAAKTGKIINIKKGQFCAPSVMANSAEKIRLAGNQNVMVCERGTMFGYNDLIVDPRNFEWLREANCPVVADVTHALQQPAGKKLDGGGVASGGLRELIPCIARTSVAVGVDGIFMEVHDDPLNAPCDGPTQWPLRNLEELLEELIAIARVTKGKKPLKIDLTPFKE

SEQ ID NO: 193 - DNA, 1311 bp, Oryza sativa
  CDS (1)..(1311)
atggattctgttgttaggacccacattggtcatatgcttaagatgatacatttttgttctatgtttctcattacttttagcgactataaaatacaagctattctctcttcacagcaaaaaagaaaagcaccagaagaaagtgatgttgctgagtctagcgactgtatgattactagccctggatttgctgtcagtccaatgctcactccagtctctgggaaagctgttaagacttccaagtcaaagactaagaacaacaaagctgggcctcagacacctacatcaaatgttggttcaccacttaatcccccaactcctgttggtacatgccgttatgacagttcgttagggcttctcacaaagaagttcataaatttgctgaagcaggctccggatggcattctagatttgaataatgctgcagaaacactagaggttcaaaaacggcgtatatatgatattaccaatgtacttgaaggaatagggttgattgaaaagacactcaagaacagaatccgttggaagggcttggatgattcaggagtggaattagataatggtctttcagctttgcaggcagaagttgaaaatcttagtctgaaggagcaagcattagatgagcgcataagtgatatgcgtgaaaaactaagaggtttaactgaagatgaaaacaatcaaagatggctctatgtgacagaagatgatatcaagggattaccctgctttcagaatgaaacactaattgcaataaaagctcctcatggcactacacttgaagtcccagatcctgacgaggctggtgattatctccagagaagatatagaatcgtattaagaagtacaatgggcccaatagatgtctacttagttagtcaatttgatgagaaatttgaggacttgggtgggggtgcaacaccatcagggcatgcaaatgtaccaaaacatcaacctactgaagtcttcaatacaacaaatgctggggttgggcaatgtagcaactcagttgctgtggacaataatattcagcacagccagacgattcctcaggatcctagtgcttcacatgattttggaggaatgacaaggattatcccttcagatattgatactgatgctgattactggctcatatcagaaggggatgtcagcattactgatatgtggaaaacagcaccagatgtgcagtgggatgagagcctggatacggatgtcttcctatctgaagacgttagaacgccaagttcacacaatcagcagccatctgcagtgggcgggccacagatgcaggtctcagacatgcataaaccctag

SEQ ID NO: 194 - protein, 436 aa, Oryza sativa
MDSVVRTHIGHMLKMIHFCSMFLITFSDYKIQAILSSQQKRKAPEESDVAESSDCMITSPGFAVSPMLTPVSGKAVKTSKSKTKNNKAGPQTPTSNVGSPLNPPTPVGTCRYDSSLGLLTKKFINLLKQAPDGILDLNNAAETLEVQKRRIYDITNVLEGIGLIEKTLKNRIRWKGLDDSGVELDNGLSALQAEVENLSLKEQALDERISDMREKLRGLTEDENNQRWLYVTEDDIKGLPCFQNETLIAIKAPHGTTLEVPDPDEAGDYLQRRYRIVLRSTMGPIDVYLVSQFDEKFEDLGGGATPSGHANVPKHQPTEVFNTTNAGVGQCSNSVAVDNNIQHSQTIPQDPSASHDFGGMTRIIPSDIDTDADYWLISEGDVSITDMWKTAPDVQWDESLDTDVFLSEDVRTPSSHNQQPSAVGGPQMQVSDMHKP

SEQ ID NO: 195 - DNA, 2580 bp, Oryza sativa
  CDS (1)..(2580)
atggagggtataaatggtacggtttttgcttatggtgtcacaagtagtgggaagacccacacaatgcatggtgatcagaattgccctggaataatcccattagccatcaaggatgtattcagcttaattcaagatgtgataaatgatctacttgatcctactggccaaaatctgcgtgtgagggaagatgcacagggaacatatgtagaaggcataaaagaagaagttgttttatctccagggcatgctctttcttttattgctgccggtgaagagcatcggcatgttggttcaaacaacttcaacttatttagcagccgaagtcataccattttcacattgatgattgaaagcagcgctcatggtgacgagtatgatggagtcatgtactcacaacttaatttgattgatctagctgggtcagagagttctaagacagagactacaggactgagaagaagggaaggatcatacattaacaagagtcttttaactctgggaactgttattgggaaactcagtgaagggagagcaacacatataccataccgtgattctaagttgactcgcctgctgcagtcatcattgagtggccatggccatgtttcactgatttgcacaatcacccctgcatcgagtaacatggaggaaacccataatacattgaaatttgcaagcagagcaaaacgtgttgaaatttatgctgctcgtaaccggatgatcgatgagaagtctttgatcaagaaatatcagagagaaatatcctctctgaagcaagagcttgatcagctaaggagaggattgattggaggtgctagtcaggaagaaatcatgattttacgccaacagttggaggagggccaggtaaaaatgcaatctcgcctggaggaggaagaggaagcaaaagctgctctgatgagcagaatacaacgcttgaccaagttaatacttgtttctacaaagaacaatattcctgccttgacagatacgtctagtcatcagcgccataattcggtcaatgaggaagataaagtaagcacatcacaagatagttctatgcttgtccaaaatgatagtgccacgaaagattcgctatcatctgcttcgccagatgctgtggatgagatcaatcaactaagatgtgctagtggagaccattcttcgattgctggttctggacccgatgaaatgcagggagggatcaccgcatcggatcaaatggatctactgattgagcaagtgaagatgcttgctggtgaaattgcttttggtaccagttcgctgaaaagactgattgagcaatctattgaagaccctgaagggacgaagaatcaaatagataatttagagcgtgaaatccgggagaagagaaggcatatgcgagccctggagcaaaaacttatggaaagcggtgaggcatcagttgctaatgcttccatgatggatatgcaacagacgattaccaagctgacagctcagtgcagtgagaaggcttttgaattagagttaagatcagctgataatcgcgtccttcaggagcagctacaacagaagaatgtggaaatcaatgagttacaagaaaaagttctacgccttgagcaacagctgacaacaaatactgaggcatcccctgaacaatgcacagaacatgagcttcatgatttgaaatctaaacttcagttgaaggaagcagaaagtgaaaagcttaaatacgagcacatgaaaatcactgaggaaaatcgtgaattggtcaaccagaacagcacattatgtgaggaagttgcctatgcaaaagaactggcatcttctgctgctgttgaacttaagaatttggctgaagaagttaccaagctatctgtacaaaatgctaagcaggcaaaagagttactaattgctcaggagttggcacactctagggttcctggtagaaaaggccgctcagctggcaggggcagggacgaggttggaacttggagtcttgatttagaggatatgaagatggagctacaggctagaaaacagagggaagctgccctagaagctgctttggctgagaaggagcatcttgaagaggagtacaagaaaaagtttgatgaggcaaagaaaaaggaactatctctggaaaacgatttagcaggaatgtgggtacttgttgctaagctgaagagaggggctttaggcatatctgacttgaatgttgatgatcgatctattaatctagctgacattactaacggtacaaaggaaaacaaagctgacaaaaatgtagctgtagttgagaaacaactttcagataataccgtgaagtcattgactgcagaggaatacagaaatccagaatttgaacctcttcttgttcgtctcaaggctaaaattcaagagatgaaggagaaggaaactgattccttgggtgacaaagatggaaattcccatgtctgcaaagtatgttttgaatctgccactgctgcagttttgcttccttgtcggcatttttgcttgtgcaagccttgctcgcttgcctgttcagaatgccctctatgccgtacaagaatcgcagacaggataattaccttcacctaa

SEQ ID NO: 196 - protein, 859 aa, Oryza sativa
MEGINGTVFAYGVTSSGKTHTMHGDQNCPGIIPLAIKDVFSLIQDVINDLLDPTGQNLRVREDAQGTYVEGIKEEVVLSPGHALSFIAAGEEHRHVGSNNFNLFSSRSHTIFTLMIESSAHGDEYDGVMYSQLNLIDLAGSESSKTETTGLRRREGSYINKSLLTLGTVIGKLSEGRATHIPYRDSKLTRLLQSSLSGHGHVSLICTITPASSNMEETHNTLKFASRAKRVEIYAARNRMIDEKSLIKKYQREISSLKQELDQLRRGLIGGASQEEIMILRQQLEEGQVKMQSRLEEEEEAKAALMSRIQRLTKLILVSTKNNIPALTDTSSHQRHNSVNEEDKVSTSQDSSMLVQNDSATKDSLSSASPDAVDEINQLRCASGDHSSIAGSGPDEMQGGITASDQMDLLIEQVKMLAGEIAFGTSSLKRLIEQSIEDPEGTKNQIDNLEREIREKRRHMRALEQKLMESGEASVANASMMDMQQTITKLTAQCSEKAFELELRSADNRVLQEQLQQKNVEINELQEKVLRLEQQLTTNTEASPEQCTEHELHDLKSKLQLKEAESEKLKYEHMKITEENRELVNQNSTLCEEVAYAKELASSAAVELKNLAEEVTKLSVQNAKQAKELLIAQELAHSRVPGRKGRSAGRGRDEVGTWSLDLEDMKMELQARKQREAALEAALAEKEHLEEEYKKKFDEAKKKELSLENDLAGMWVLVAKLKRGALGISDLNVDDRSINLADITNGTKENKADKNVAVVEKQLSDNTVKSLTAEEYRNPEFEPLLVRLKAKIQEMKEKETDSLGDKDGNSHVCKVCFESATAAVLLPCRHFCLCKPCSLACSECPLCRTRIADRIITFT

SEQ ID NO: 197 - DNA, 2244 bp, Oryza sativa
  CDS (1)..(2244)
atggaggccgtccagccgccggtgttgagtgacagattgaacccgttgatccaccacagatcagcttttccagccagtgttgtgcagcctcaagatcatggtgacagcgttccgggcttgtgcagtggatcttttattgacaccaggggcaggcttagcagtggatcaatgacatctgaagattcaccggcactgacgccgagatggttgtccatcaagtccaactccagctctgacaactgctttgaaggatcgaaaagagcggtatcgtggtcagaccggcatgttttcaatccaaatgggcaggtcaactatgcagaattcatggatttgatggaacaggagcttgatacccaacttgataggctcaagggggatgtaactgggctggaaaactttgcgttgccggataatgggtatataattggtacacacctgggcatgtctcttgatgtgatgctgattgagattgatgagaggttcaatgccttgaagttactgctggccacagtgtttcggaaggctagggagatggacagctcgtcggtgtctgatctgcagtgggagcatgagttgcaattggaggtcatcaacattacaataggagaattcatcagtggcttgcaagaggagatggagaggaagctgtatgagcaaatttctatgacaaactccatgagtaaaaattggcaggatgccatagctcaatttgccagcatgcgcgatgatctgggtgctctttctaagctattgttgccctcactacaagaatcacatatttctcacagcaagcatgaaacttcaagcaacaggagcaataggtggaagtacaacatctttggaaagaaaaacaaggaggatcattcatctcgcgcggaggaaaataagagtttcaggaaacagaagtccatggttgtcttggaaaaatctgacttccgtcacctgaatggtatgagtaaagaggagatcataacttattttaagtccgaaatgagcaaattgaagaggatgcatgaattggatttgcaggagaagaccgaggagctcttcaaattcaaacgggagaagggattgcttactctcaagaatgatgtggaatttgagccgttaagaaagaaaattccacagattatttctagaatggaccaaatcatttcgaagaacataaagatgccttcactttgcatgactaatgatggactggatgaaagatgcatatcagcaaaaagaatcgattctttatattacgaaaatcagcatcttagaggtttgcttgcagataatatgaaggatgtcaaggaattatcatctcagctatctgaagccagtaaagaaatgtctattcagttgtcatcagaagacgatctcctgagacaaattgccaaaattaaagaagaatatgaggatctccaaatcgaagccggtgttagggatggagtgtatcaaactattacaagaaagttgcttgatgattctatgaacagcatgcatgatgctgcaacgaattttagtacagaactgtcttctcttgaagctatgatatctgaaaaggagaaggctttgtgtttgtcaaatgaagaaaaccgaatgttaaaagaaaaaatagcagagttagagcaatgtttgatccaagataaacaggaagatccagaagtcatcaagcaagagagtacagagatcattttgcgtgatatagaggtggcgcctcacatatcaccaagaagatcacatgagactcccaagcaagatatgcaatatgatgaacttgtcaaacttaactcaagtttagaaattgcttcagctgcattgaaggaagttgaaaataaaaatatcgattataatggtattttcaccaaaaatgagcaagaaaagcaactggagtgcattttaatatctattatgaagttgtcaaaggaatttgtggagatcgagcaaaaattatcagtagaaagaagtgcaagcaggtcagaggatttgagtgatcattgcaaccacatggtcagacaagccgttgtactaacaaaaataggcctttggtacaaacaaatgctagaaacaaggcgttctgagctccagaaggctgaagccaaggttgtcattttgggcgacaaggttaattcacatttaaaccttcttcagaagatatatgtaactcttgatcgctactcccctacattacagcaatatcctgggttgctagatgctttcttgaagacatgcaagcttgttgcagcctttgattaa

SEQ ID NO: 198 - protein, 747 aa, Oryza sativa
MEAVQPPVLSDRLNPLIHHRSAFPASVVQPQDHGDSVPGLCSGSFIDTRGRLSSGSMTSEDSPALTPRWLSIKSNSSSDNCFEGSKRAVSWSDRHVFNPNGQVNYAEFMDLMEQELDTQLDRLKGDVTGLENFALPDNGYIIGTHLGMSLDVMLIEIDERFNALKLLLATVFRKAREMDSSSVSDLQWEHELQLEVINITIGEFISGLQEEMERKLYEQISMTNSMSKNWQDAIAQFASMRDDLGALSKLLLPSLQESHISHSKHETSSNRSNRWKYNIFGKKNKEDHSSRAEENKSFRKQKSMVVLEKSDFRHLNGMSKEEIITYFKSEMSKLKRMHELDLQEKTEELFKFKREKGLLTLKNDVEFEPLRKKIPQIISRMDQIISKNIKMPSLCMTNDGLDERCISAKRIDSLYYENQHLRGLLADNMKDVKELSSQLSEASKEMSIQLSSEDDLLRQIAKIKEEYEDLQIEAGVRDGVYQTITRKLLDDSMNSMHDAATNFSTELSSLEAMISEKEKALCLSNEENRMLKEKIAELEQCLIQDKQEDPEVIKQESTEIILRDIEVAPHISPRRSHETPKQDMQYDELVKLNSSLEIASAALKEVENKNIDYNGIFTKNEQEKQLECILISIMKLSKEFVEIEQKLSVERSASRSEDLSDHCNHMVRQAVVLTKIGLWYKQMLETRRSELQKAEAKVVILGDKVNSHLNLLQKIYVTLDRYSPTLQQYPGLLDAFLKTCKLVAAFD

SEQ ID NO: 199 - DNA, 741 bp, Oryza sativa
  CDS (1)..(741)
atggggcggggcaaggtgcagctgaagcggatcgagaacaagatcaaccggcaggtgaccttctccaagcgcaggtcaaaactgctcaagaaggcgaatgagatctccgtgctctgcgacgccgaggtcgcgctcatcatcttctccaccaagggcaagctctacgagtacgccaccgactcatgtatggacaaaatccttgaacgttatgagcgctactcctatgcagaaaaggtccttatttcagctgaatctgacactcagggcaactggtgccacgaatataggaaactgaaggctaaggttgagacaatacagaaatgtcaaaagcacctcatgggagaggatcttgaatctttgaatctcaaagagctgcagcagctggagcagcagctggaaaattcgttgaaacatatcagatccagaaagagccaactaatgctcgagtccattaacgagcttcaacggaaggaaaagtcactgcaggaggagaataaggtcctacagaaagaactggtggagaagcagaaagtccagaagcaacaagtgcaatgggaccagacacaacctcaaacaagttcctcatcatcctccttcatgatgagggaagcccttccaacaactaatatcagtaactaccctgcagcagctggcgaaaggatagaggatgtagcagcagggcagccacagcatgaacgcattgggctgccaccatggatgctgagccacatcaacggctaa

SEQ ID NO: 200 - protein, 246 aa, Oryza sativa
MGRGKVQLKRIENKINRQVTFSKRRSKLLKKANEISVLCDAEVALIIFSTKGKLYEYATDSCMDKILERYERYSYAEKVLISAESDTQGNWCHEYRKLKAKVETIQKCQKHLMGEDLESLNLKELQQLEQQLENSLKHIRSRKSQLMLESINELQRKEKSLQEENKVLQKELVEKQKVQKQQVQWDQTQPQTSSSSSSFMMREALPTTNISNYPAAAGERIEDVAAGQPQHERIGLPPWMLSHING

SEQ ID NO: 201 - DNA, 750 bp, Oryza sativa
  CDS (1)..(750)
atggggaggggtcgggtggagctgaagaggatcgagaacaagatcaaccggcaggtgacgttcgccaagcgcaggaatggcctgctcaagaaggcgtacgagctctccgtcctctgcgacgccgaggtcgccctcatcatcttctccaaccgcggcaagctctacgagttctgcagcacccagagcatgactaaaacgcttgagaagtatcagaaatgcagttacgcaggacccgaaacagctgtccaaaatagagaaagtgagcaattgaaagctagccgcaatgaatacctcaaactgaaggcaagggttgaaaatttacaacggactcaaagaaatttgctgggtgaagatcttgattcattaggcataaaagagctcgagagcctagagaagcagcttgattcatccctgaagcacgtcagaactacaaggacaaaacatctggttgaccaactgacggagcttcagagaaaggaacaaatggtttctgaagcaaatagatgccttaggagaaaactggaggaaagcaaccatgttcgcgggcagcaagtgtgggagcagggctgcaacttaattggctatgaacgtcagcctgaagtgcagcagcctcttcacggcggcaatgggttcttccatccacttgatgctgctggtgaacccacccttcagattgggtaccctgcagagcatcatgaggcgatgaacagtgcgtgcatgaacacctacatgcccccatggctaccatga

SEQ ID NO: 202 - protein, 249 aa, Oryza sativa
MGRGRVELKRIENKINRQVTFAKRRNGLLKKAYELSVLCDAEVALIIFSNRGKLYEFCSTQSMTKTLEKYQKCSYAGPETAVQNRESEQLKASRNEYLKLKARVENLQRTQRNLLGEDLDSLGIKELESLEKQLDSSLKHVRTTRTKHLVDQLTELQRKEQMVSEANRCLRRKLEESNHVRGQQVWEQGCNLIGYERQPEVQQPLHGGNGFFHPLDAAGEPTLQIGYPAEHHEAMNSACMNTYMPPWLP

SEQ ID NO: 203 - DNA, 594 bp, Oryza sativa
  CDS (1)..(594)
atgagcgcgtctcggttcatcaagtgcgtcaccgtgggggacggcgccgtgggcaagacctgcatgctcatctcctacacctccaacaccttccccacggactatgttccaactgtttttgataacttcagtgcaaatgttgtggtcgatgggagcactgtgaacttggggttgtgggatacagcaggacaagaggactacaataggctacgcccgttgagctatcgtggcgctgatgttttcctgctggccttttctctgatcagcaaagcaagctatgagaatgtttctaaaaagtggatacctgaattaaggcattatgctcctggtgtgccaataattctcgttggaacaaagcttgatctgcgggatgataagcaatttttcgtagatcaccctggtgctgtacctatttccactgctcagggcgaagagctgaggaaactcattggtgcagcggcatacattgaatgcagttcaaaaacacagcaaaacatcaaggcagttttcgatgctgcgattaaggtggttctccagcctccaaagcaaaagaagaagaagaaaaaggcgcagaaaggatgtgccatcttgtaa

SEQ ID NO: 204 - protein, 197 aa, Oryza sativa
MSASRFIKCVTVGDGAVGKTCMLISYTSNTFPTDYVPTVFDNFSANVVVDGSTVNLGLWDTAGQEDYNRLRPLSYRGADVFLLAFSLISKASYENVSKKWIPELRHYAPGVPIILVGTKLDLRDDKQFFVDHPGAVPISTAQGEELRKLIGAAAYIECSSKTQQNIKAVFDAAIKVVLQPPKQKKKKKKAQKGCAIL

SEQ ID NO: 205 - DNA, 729 bp, Oryza sativa
  CDS (1)..(729)
caaggagacataaatgaaaagatgagagcaattctgattgattggctcattgaggtccatcacaaatttgagctgatggatgagactctctttcttactgttaacatagtagacagattcttggaaaaacaagttgtgccaaggaagaagttgcagctagttggagtgacagctatgctccttgcttgcaaatatgaggaagtcgcagtccctgtcgtcgaggatctagtgctaatttctgaccgggcttatacaaaaggacaaattctggaaatggaaaagttgatcctaaacacactccagttcaacatgtctgtaccaacaccttacgtttttatgagacggtttctgaaggcagctcagtctgacaagcagctacagctactttcctttttcattctggagctctccctggtggaataccaaatgctcaagtaccgaccttcgcttctttctgctgctgcagtttacacagcacaatgtgctctcactcgttgccagcagtggacaaagacctgcgaactacatagtagatataccggagagcagcttcttgagtgttctaggatgatggtagatttccaccagaaggccggagcaggcaagctcaccggcgtgcaccggaaatacagtacgttcaagtttgggtgtgcagccaaaacggagcctgctctcttcttgcttgagtcaggagcaggaggttacaaccttaagaagcagccttgttga

SEQ ID NO: 206 - protein, 242 aa, Oryza sativa
QGDINEKMRAILIDWLIEVHHKFELMDETLFLTVNIVDRFLEKQVVPRKKLQLVGVTAMLLACKYEEVAVPVVEDLVLISDRAYTKGQILEMEKLILNTLQFNMSVPTPYVFMRRFLKAAQSDKQLQLLSFFILELSLVEYQMLKYRPSLLSAAAVYTAQCALTRCQQWTKTCELHSRYTGEQLLECSRMMVDFHQKAGAGKLTGVHRKYSTFKFGCAAKTEPALFLLESGAGGYNLKKQPC

SEQ ID NO: 207 - DNA, 1419 bp, Oryza sativa
  CDS (1)..(1419)
atgaaagagcccgcgcaggtgaggacggcgcggggcggcgcggcggatggggtggaggtgggggtggaggaggaggaggagccgccgcgatcggcgacggtgaagcaggaggaggcgaacgcggtgctcggggcggaggggtcccgcccgttcgccatgcgggagctcaaggaggaccacgaggtcgcggccgggagcggcgtgaaggcggcgtctggggagaggaacgggatcggatcggcggatgcccagggttcgtcgtacagccaagagagtatgcagcagttttcatcccatcatgatgttgcaatggacttaataaatagtgtcactggagttgacgaggaaggccgttctcgccagaggattctttcttttgctgccaaaagatacataagcgcaatagaaagaaatcatgatgaccctgatgcatattataattgggcccttgttctccaggagagtgcagacaatgtagatccaaattctagttcgtccaaagatgcattgcttgaggaggcttgcaaaaagtatgctgaagctacccgtctttgcccaactctttatgatgcatattataactgggctattgctattgctgatcgggctaaaatgcgaggtcgtactaaagaagctgaagagctctggaagcaggcaatactgaattatgagaaggctgtccagctaaattggaatagtccgcaggctcttaataattggggtcttggactacaggaactgagtgcaattgttccggctcgtgagaagcaaaccatcataaaaacagctataagtaagtttcgagctgcaattcaactgcaatttgatttccatcgggcaatatacaatcttgggacagtcttgtatggtttagctgaggatacaatgaggtctgggaagccaggtgtgtccgctagcgagttttacagtcagtctgctatctatgttgcagctgcccatgcactgaagccaaattactcggtctaccgcagtgctttgcgattagtccgttcaatgctgcctttgccatatctcaaagtgggatatttgattgctcctccagaaaatagtgccattgcaccacacaaagaatgggagaggtcacagtttgttttgaaccatgaagaactccagcaggtcaatgcctctgaccagcctccatcacaatcacctgggcatgtggacagcggcagaaagcttttcaggatagttgttgcagacattgtttctgtgtcagcatgcgctgatctaaccctgccacccggtgctggccttcgcatcgatactattcatggccctagattcttggttgctgataactgggagaccattgacagttggctagacgctatacgcctagtctacaccatatttgcaagagggaggagtgatgtccttgctgggattattactggctga

SEQ ID NO: 208 - protein, 472 aa, Oryza sativa
MKEPAQVRTARGGAADGVEVGVEEEEEPPRSATVKQEEANAVLGAEGSRPFAMRELKEDHEVAAGSGVKAASGERNGIGSADAQGSSYSQESMQQFSSHHDVAMDLINSVTGVDEEGRSRQRILSFAAKRYISAIERNHDDPDAYYNWALVLQESADNVDPNSSSSKDALLEEACKKYAEATRLCPTLYDAYYNWAIAIADRAKMRGRTKEAEELWKQAILNYEKAVQLNWNSPQALNNWGLGLQELSAIVPAREKQTIIKTAISKFRAAIQLQFDFHRAIYNLGTVLYGLAEDTMRSGKPGVSASEFYSQSAIYVAAAHALKPNYSVYRSALRLVRSMLPLPYLKVGYLIAPPENSAIAPHKEWERSQFVLNHEELQQVNASDQPPSQSPGHVDSGRKLFRIVVADIVSVSACADLTLPPGAGLRIDTIHGPRFLVADNWETIDSWLDAIRLVYTIFARGRSDVLAGIITG

SEQ ID NO: 209 - DNA, 1260 bp, Oryza sativa
  CDS (1)..(1260)
atggagaacatgagatctgagaactttaaccaaggtgtttcaatggagggcgtcaagcatgcgcccgagatggcaaacaccaacaggagggctctgcgggacatcaagaacatcatcggagcacctcaccagcacatggctgtgagcaagaggggtttgctagataaacctgccgctaagaaccaatctggacaccgtcctatgacgaggaaatttgctgcaacactggcaaaccaaccctccattgctcccctggcacccattggaagtgagaggcaaaaaaggacagcagattctgcatttcatggtccagcagatatggagtgcaccaagatcacatctgatgatttgccattgccaatgatgtctgagatggacgaagtgatgggttctgaactgaaagaaattgagatggaagacattgaggaggcagcacctgatattgacagctgtgatgcaaataactcccttgcagtagttgaatatgttgatgaaatttacagcttctacaggaggagtgagggtttgagctgtgtctctcctaattacatgttgagccaaaatgacataaatgagaagatgcgcggcattctcatcgattggctgatagaggtgcattacaagttagagctattggatgagaccctcttccttactgtgaatatcatagaccgattcttggctcgcgaaaatgtggtgcgaaagaagcttcagttggttggcgtgactgccatgctgctcgcctgcaagtatgaagaagtgagcgttcctgtagtggaggatcttatcctaatctgcgaccgcgcctacacaagaacagatattctcgaaatggagaggatgattgtaaacactcttcagtttgatatgtcagttccaactccatactgtttcatgagaaggttcctcaaggctgcacaatctgacaagaagcttgagctcatgtctttcttcataattgagctgagccttgtcgagtatgagatgctcaaattccagccgtcaatgctggcggctgctgccatctacactgctcagtgcaccattaatgggttcaagtcctggaacaaatgctgtgagctgcatacaaaatactctgaagaacagctgatggagtgctccaagatgatggttgagctccaccaaaaagcaggacatgggaagcttactggagttcatagaaagtacagcacatttaggtatggttgccccgcaaaatcggagcccgccgtcttcttgctcaagagcgtggcactgtaa

SEQ ID NO: 210 - protein, 419 aa, Oryza sativa
MENMRSENFNQGVSMEGVKHAPEMANTNRRALRDIKNIIGAPHQHMAVSKRGLLDKPAAKNQSGHRPMTRKFAATLANQPSIAPLAPIGSERQKRTADSAFHGPADMECTKITSDDLPLPMMSEMDEVMGSELKEIEMEDIEEAAPDIDSCDANNSLAVVEYVDEIYSFYRRSEGLSCVSPNYMLSQNDINEKMRGILIDWLIEVHYKLELLDETLFLTVNIIDRFLARENVVRKKLQLVGVTAMLLACKYEEVSVPVVEDLILICDRAYTRTDILEMERMIVNTLQFDMSVPTPYCFMRRFLKAAQSDKKLELMSFFIIELSLVEYEMLKFQPSMLAAAAIYTAQCTINGFKSWNKCCELHTKYSEEQLMECSKMMVELHQKAGHGKLTGVHRKYSTFRYGCPAKSEPAVFLLKSVAL

SEQ ID NO: 211 - DNA, 447 bp, Oryza sativa
  CDS (1)..(447)
caacggaggagaaggagaaagagagggagaggaagagatggcgagccaggggagcgcgggagggggagcggcggttcctccggggtcgccgtcaccatcaccaccgcgcccatgacggagacggaggacgacatggccgtcgccgaggaggaggaggtggcggcggcgtcggcggagacggaggagcacgtgcagcgcatcctcctcgccatcgacgccttcactcgccaggtgtcggagatgctggaggcggggcgtgcgctgttcaagaacctcgccgccgacttcgaggaccgcctctgctcgatccacaaggagagggtggagaggtgggaggaggagatccgggagctgcgcgcccgcgacgccgccaacgagcaggcacgctccctcctccacaacgcccagctccacctcctcgccaccgtccgccacgaccacacctga

SEQ ID NO: 212 - protein, 148 aa, Oryza sativa
QRRRRRKRGRGRDGEPGERGRGSGGSSGVAVTITTAPMTETEDDMAVAEEEEVAAASAETEEHVQRILLAIDAFTRQVSEMLEAGRALFKNLAADFEDRLCSIHKERVERWEEEIRELRARDAANEQARSLLHNAQLHLLATVRHDHT

SEQ ID NO: 213 - DNA, 2064 bp, Oryza sativa
  CDS (1)..(2064)
atgtcgtcgccgctcgccgtcgtctccagcttctggaaagactttgatctggagaaggaaagaggtggtttggatgagcagggtttaaagattgcagagaatcaagagaccagccagaaaaacagacgccggcttgctgagagcactagggatttcaagaaggcgtcttcagatgataagcttagtttattcaattctttgctgaagagttatcaagaggaagttgataatctcacaaagagagcaaaatttggagaaaatgcatttctcaacatctaccagaagctctatgaagcccctgatccatacccagctcttgcttctatggctgagcaagatcagaaactatctgaactggagactgaaaatcggaagatgaaacttgagcttgaagagtaccgggcagaagccgcccacctaaagaaccaacaagcaacaattaggcgacttgaggagcgaaaccgccaactagaacaacagatggaggaaaaagtcagagagatggttgaaatgaagcagaggagtttggcagaagatagccagaaaactcttgaagccctgaaagacagggagcgggcattgcaggaccagctaagacaagccacagaaagtgtaaagaatatgcagaagctacatgaatcagcacaaagtcaattgtttgagcttcgtactcaatcagaggaggaccgggctgcaaaggaaactgaagtcaatcttctgttggatgaagttgaacgggcccaagcacgtttagttagtcttgagagagaaaagggtgatttacgatctcagttgcaaacaacaaatgaagatgcaaccaatagtagtgactacgtggactcaagtgatatacttgagagttccttgaatgccaaggagaagatcatctcagagctgaatgcagaactgcgtagtattgaaaatactttatcttctgagagagaaacacatgttaatgaactgaaaaagttgactgctttgctcagtgagaaggaaaatgctctgacagagttgaagaaagaacttcaagaaagaccaacaagaagactagtagatgatctcaagaaaaaggttcagattttgcaggctgtagggtacaactccattgaagctgaagattgggagctagcaacaaatggtgaagaaatgagcaagttggaagctttgcttcttgataagaaccgtaaaatggagcatgaactaacacagctgaaggtcaaaatatcagagaagtcaaatcttcttgaggaggctgaaaaaaagattgctgagctaactgcaaaggctgaagagcagcagaagttgattttgaaactcgaggatgacatactaaagggctatagttcaactgataggaggacttcacttctgaatgattgggatcttcaagaaattggctcaaatgaagtagcagagggtactgatccaaggcatgcaccacaagaccaagaccaaagttccatgcttaaggtcatttgcaatcagagggatcgtttccgtacacgtctacgtgaaactgaggaggaactaagaagactaaaagagaagtatgaaatgctagttgtagaattggaaaaaactaaagcagataatgttcaactgtatgggaagattcgttacgtgcaggactacagccatgagaagattgtttccagaggaccaaagaagtatgcagaagatgttgaaagtggttcttcagatgttgagacgaagtacaagaaaatgtatgaggatgacataaatccttttgctgctttttcaaagaaggaaaaggatcaacggtacaaggaacttggtttaagagacaaaatcactcttagcagtggacgttttctccttggtaacaaatatgcccggacatttatattcttctacactattggattacatctccttgtatttacattgctgtacagaatgtcagctttgagctatctcagacgtctgaatacgttttctgtagataaaaattttccagatatggagacggggtggatgggaaatgacaggatgaggcgtggtcgtgcgtttgagccgttattatgtaaactgttgtatcactaa

SEQ ID NO: 214 - protein, 687 aa, Oryza sativa
MSSPLAVVSSFWKDFDLEKERGGLDEQGLKIAENQETSQKNRRRLAESTRDFKKASSDDKLSLFNSLLKSYQEEVDNLTKRAKFGENAFLNIYQKLYEAPDPYPALASMAEQDQKLSELETENRKMKLELEEYRAEAAHLKNQQATIRRLEERNRQLEQQMEEKVREMVEMKQRSLAEDSQKTLEALKDRERALQDQLRQATESVKNMQKLHESAQSQLFELRTQSEEDRAAKETEVNLLLDEVERAQARLVSLEREKGDLRSQLQTTNEDATNSSDYVDSSDILESSLNAKEKIISELNAELRSIENTLSSERETHVNELKKLTALLSEKENALTELKKELQERPTRRLVDDLKKKVQILQAVGYNSIEAEDWELATNGEEMSKLEALLLDKNRKMEHELTQLKVKISEKSNLLEEAEKKIAELTAKAEEQQKLILKLEDDILKGYSSTDRRTSLLNDWDLQEIGSNEVAEGTDPRHAPQDQDQSSMLKVICNQRDRFRTRLRETEEELRRLKEKYEMLVVELEKTKADNVQLYGKIRYVQDYSHEKIVSRGPKKYAEDVESGSSDVETKYKKMYEDDINPFAAFSKKEKDQRYKELGLRDKITLSSGRFLLGNKYARTFIFFYTIGLHLLVFTLLYRMSALSYLRRLNTFSVDKNFPDMETGWMGNDRMRRGRAFEPLLCKLLYH

SEQ ID NO: 215 - DNA, 4806 bp, Oryza sativa
  CDS (1)..(4806)
atgcggagacggaggtggaggcggcggctggctcccgtgttccgcttctacccgacggaggaggagctgatatgcttatacctccgcaacaagctcgacggtttccgcgacgacatcgagcgcgtcatccccgtcttcgacatctactccgtcgacccgttgcagctctcaggtaccagcacacgcgtgtacctacttttgcccgcggcgaggagggggagcggatggttctacttctgcccgcggcaggagcgggaggtgcggggcgggcgaccgagccagaccacgccgtcggggtactggaaggcggcgggcacgacgggggtcgtctactccgcggagccgtggccgcgcgccgttgggaacaaagaccgcgtggaagatgatgagagagagagagaggggggaagatggaagatgaggtcttacaggtgggtattccctattgcaaaaaggcagattacagttttggcagagaagtgtctgcccagggacacagatgaagatctaggtggggggcatgtcgatgacatgaccaaactgacttatcttaatgaaccaggtgttctatacaatttgaagagaagatatgcattgaatgagatatatacatacactggaagcatcttgattgctgttaatccattcacgaggcttcctcacctgtacaatgagtacatgatggagcaatacaagggtgtccgactaggggagttgagtccacatgtttttgcagtagctgatgcatcatacagggctatggtgaatgattcccggagccagtcaatcctggttagtggtgaaagtggcgctggcaagactgagacaacaaagtttatcatgcaatatcttacgtatgttggtggtagagctgctattgacgatcgaactgttgaacagcaggttcttgaatctaaccctcttctggaggcatttggcaatgcaaaaacagttagaaatgacaactcaagccggtttggcaaatttgtggagatgcaatttgatgcaaatggtagaatatctggggctgctattaggacctatcttttggaaaggtcccgtgttgtgcagattaatgatcctgaaagaaattttcattgcttttatcagttatgtgcgtctggaaaggatgcagaactgtacaagcttggtcacccagggagtttccattacttgaataaaagtaagacatatgaattggaaggaacaaataatgaagacgagtactggaagacaaaaagggcaatggatattgtcggaattagcagaaatgatcaggatgctatatttcggatactggcagccattcttcatcttggcaacattgagttttctcctggaaaggaaattgattcttcaaaaattaaggatccaacatcaaattttcaccttcaaatggcagccaaactattcatgtgtgatccagatctgttggtctcaactctatgtacacgcgccattaacactctcgaaggagcaattataaaagcattagactgttctgcagcagcagctaatcgtgatgctctagcaaagactgtatatgcaagactatttgactggcttgttgagaatattaacaaatctattggtcaagatgttgattccaaagtacaaattggtatcttggatatttatggttttgagagcttcaaaaataacagttttgagcaattctgcatcaacttcgccaatgaaaagcttcagcaacatttcaatgagaaaccgattggaattattgcactgctggatgaagcttgcatgttcccaaaatctactcatgagacctttgcaacaaagatgttcaggaatttctcttcgcatcataggcttgagaagacaaaattctcggagacagattttactatctcccattatgctgggaaggtgacgtatcaaacagaatcatttttggagaagaatagagattatattgttgcagagcactgcaatcttttatcttcgtcaagatgccctttagtttctggactttttggtacattaccagaagaatctttgagatcgtcgtacaagttctcatcagttgcttcaagatttaagcaacaacttcaagccctcatggaaaccctcaactcgacagagcctcactacgtacgctgcgtgaagcctaactctgttaatcagcctcagatttttgaaaatcagagtgtcctgcatcaactacgctgcggaggtgttttagaggctgttcgcatcagtcttgctggctatcctaccagaaggacttatgctgaatttgttgaccggtttggtgttctggttcccgagttgatgcttggaagttatgatgagagggcattgacaaagggaattcttgaaaagatgaagcttgataattttcaacttggtagcactaaggttttccttagagctggtcaaatcgcaattttagatatgcgtcgtgctgaagttttggagaacgctgcacgccacattcaaggtcgtttcagaacattcattacacgcaaagagtttgtgaaaacaagggaggcttcaatttctatacaagcatattgcagaggctgtttggcaaggaagaagtatatggttaaaagagaaacagcggctgctataattgttcaaaaatatgtcaggagatggcggcttcatcggacttaccagcaatctcattcagcagctcttcttattcaatcctgtattcgaggatttatcgctcgccattatttctcagttatcaaagagcagaaagctgctttggtgatacagtccttgtggagaaaacggaaggttatcattcttttccaacaatacaggcaagccactgtggcaattcagtgtgcttggagacagaaagttgcaagaagagaactaaggagactcaaaatggctgcaaatgaagcaggtgcactgcgtgaggcgaagaataaacttgagaaaaagttggatgatcttactctgagactaactctggaaaggagactgcgggctgctggtgaggaagcgaagtcagtagaaatattaaagcgcgacaaactgatagaatcattaagtgccaaatgtgctgctgccaagtcggctgctcaaagcgaacacgacaaaaatctgctactccagaggcagttggatgattcattgagagagataactatgttgcggagtagcaagattatgacagcagaagcagaaagggagaactccaatctgaagaacttagttgaatcattgtcaaagaataattcatcacttgaatatgaactcacctcagctcgtaaaggtagtgatgctacgatgaagaaattgaaagacgtagagggaaaatgcaaccatctccagcaaaatttggacaaattgcaggaaaaacttacaaacatggaaaatgaaaatcatgttcttaggcaaaaggcattaaacatgtctccgttgaacaatatgcccatgactacaaaggcttttcctcagaaattcgctacaccgattgggcttccaaatggcgagcagaagcacggatatgaaacaccaccaccagcaaaatatctcgcttcacttccacagagtttaactagatcaaggagaaccaggatgcctgttgaaaggcaggaggaaaatcatgaaatcttattacgatgcataaaggaaaatctaggattcaaggatggtaaaccagtcaccgcatgcattatctacagttgccttttacactggcgtgcttttgaatctgagaggactgctatttttgatcatgtcattgaagccataaataatgttctcaagggggaagaggctgacggtagattaccttattggttgtccaatacctcttcattgctatgccttctgcagaagaatttacggtcaaatggattatttgctacaccatcccgcaggtctggtggaactctagggattggtgacaagatagtgcaaacactcagatctccttcaaagcttatgggacgcagtgataatcttggacaagtggatgctcggtatccagccatattattcaaacagcaactaactgcgtgtgttgaaaagatttttgggcaacttagggataatctgaaaaaggaaatatcaccacttcttagtgtctgcattcaggctccaaaatcatcacgtgcacagcctggaaaagcaaccaaatcacctgggattggtgctcaaccaccatcaaactcccattgggacaatattgtcaaatttcttgacctgcttatggacactttacatgaaaattatgtgccatcattctttatacgtaaacttatcactcagctattctcttttatcaatatacagctttttaacagccttcttcttcggcgtgaatgctgtactttctccaatggggaatatgtcaaagccggtctgtcattgctggagaaatggattactgatgccacggatgagtttgcaggaacatctatgcatgagctaaattatatcagacaagctgtcggatttttggtcatacatcaaaaaaggaagaagaagcttgaggagattaggaacgaactttgcccgaacttgagtgtacgccaaatatacaggatatgctcaatgtactgggacgacaaatacaatacccaaggaatatcaaatgaggttgtttctgcaatgagggaggaagtaaacaaagatactcagaatctcgtatcaaattcctttttattagatgacgacttatgtataccgttttctacagaggatttgtcaattgccatccctgcaatagattatgtagatatagaacttccagaatctcttcatcactatgcatcagtacagctcctactcaagcatcatgatccacagcctgtctaa

SEQ ID NO: 216 - protein, 1601 aa, Oryza sativa
MRRRRWRRRLAPVFRFYPTEEELICLYLRNKLDGFRDDIERVIPVFDIYSVDPLQLSGTSTRVYLLLPAARRGSGWFYFCPRQEREVRGGRPSQTTPSGYWKAAGTTGVVYSAEPWPRAVGNKDRVEDDEREREGGRWKMRSYRWVFPIAKRQITVLAEKCLPRDTDEDLGGGHVDDMTKLTYLNEPGVLYNLKRRYALNEIYTYTGSILIAVNPFTRLPHLYNEYMMEQYKGVRLGELSPHVFAVADASYRAMVNDSRSQSILVSGESGAGKTETTKFIMQYLTYVGGRAAIDDRTVEQQVLESNPLLEAFGNAKTVRNDNSSRFGKFVEMQFDANGRISGAAIRTYLLERSRVVQINDPERNFHCFYQLCASGKDAELYKLGHPGSFHYLNKSKTYELEGTNNEDEYWKTKRAMDIVGISRNDQDAIFRILAAILHLGNIEFSPGKEIDSSKIKDPTSNFHLQMAAKLFMCDPDLLVSTLCTRAINTLEGAIIKALDCSAAAANRDALAKTVYARLFDWLVENINKSIGQDVDSKVQIGILDIYGFESFKNNSFEQFCINFANEKLQQHFNEKPIGIIALLDEACMFPKSTHETFATKMFRNFSSHHRLEKTKFSETDFTISHYAGKVTYQTESFLEKNRDYIVAEHCNLLSSSRCPLVSGLFGTLPEESLRSSYKFSSVASRFKQQLQALMETLNSTEPHYVRCVKPNSVNQPQIFENQSVLHQLRCGGVLEAVRISLAGYPTRRTYAEFVDRFGVLVPELMLGSYDERALTKGILEKMKLDNFQLGSTKVFLRAGQIAILDMRRAEVLENAARHIQGRFRTFITRKEFVKTREASISIQAYCRGCLARKKYMVKRETAAAIIVQKYVRRWRLHRTYQQSHSAALLIQSCIRGFIARHYFSVIKEQKAALVIQSLWRKRKVIILFQQYRQATVAIQCAWRQKVARRELRRLKMAANEAGALREAKNKLEKKLDDLTLRLTLERRLRAAGEEAKSVEILKRDKLIESLSAKCAAAKSAAQSEHDKNLLLQRQLDDSLREITMLRSSKIMTAEAERENSNLKNLVESLSKNNSSLEYELTSARKGSDATMKKLKDVEGKCNHLQQNLDKLQEKLTNMENENHVLRQKALNMSPLNNMPMTTKAFPQKFATPIGLPNGEQKHGYETPPPAKYLASLPQSLTRSRRTRMPVERQEENHEILLRCIKENLGFKDGKPVTACIIYSCLLHWRAFESERTAIFDHVIEAINNVLKGEEADGRLPYWLSNTSSLLCLLQKNLRSNGLFATPSRRSGGTLGIGDKIVQTLRSPSKLMGRSDNLGQVDARYPAILFKQQLTACVEKIFGQLRDNLKKEISPLLSVCIQAPKSSRAQPGKATKSPGIGAQPPSNSHWDNIVKFLDLLMDTLHENYVPSFFIRKLITQLFSFINIQLFNSLLLRRECCTFSNGEYVKAGLSLLEKWITDATDEFAGTSMHELNYIRQAVGFLVIHQKRKKKLEEIRNELCPNLSVRQIYRICSMYWDDKYNTQGISNEVVSAMREEVNKDTQNLVSNSFLLDDDLCIPFSTEDLSIAIPAIDYVDIELPESLHHYASVQLLLKHHDPQPV

SEQ ID NO: 217 - DNA, 543 bp, Oryza sativa
  CDS (1)..(543)
atgaaaaatgtaacccattctttcgtttttttagctcactggccatccgctgggagtttcgggcttaataccgatattttagcaacaaatctaataaatctaactgtagtggttggtgtattgatttattttggaaagggagtgttaaaagatttattagataatcgaaaacagaggatcttgagtactattcgaaattcggaagaattgcgtagaggaaccattgagcagctcgaaaaagctcgaattcgattacagaaagtcgaactagaagcggatgagtatcgaatgaatggatactctgagatagaacgagaaaaagcaaatttgattaatgccacttctattagtttggaacaattagaaaagtctaaaaacgaaaccctttattttgaaaaacaaagggcgatgaatcaggtccgacaacgggttttccaacaagccgtacaaggagctctaggaactctgaatagttgtttgaataccgagttacatttccgtacgattcgtgctaatattagcattctcggggccatggaatga

SEQ ID NO: 218 - protein, 180 aa, Oryza sativa
MKNVTHSFVFLAHWPSAGSFGLNTDILATNLINLTVVVGVLIYFGKGVLKDLLDNRKQRILSTIRNSEELRRGTIEQLEKARIRLQKVELEADEYRMNGYSEIEREKANLINATSISLEQLEKSKNETLYFEKQRAMNQVRQRVFQQAVQGALGTLNSCLNTELHFRTIRANISILGAME

SEQ ID NO: 219 - DNA, 843 bp, Oryza sativa
  CDS (1)..(843)
atgagcttccaggacctggaggcggggaacgcccgcgggctgccgcggaggggcggtggcggcagggcgggcgccgcggccgccggggcgggggcgtcgcaggccgtggcgtcgggggtgttccagatcaacacggcggtgtcgacgttccagcggctggtcaacacgctcggcacgcccaaggacacccccgacctccgcgagaggatacacaagacacgtcaacacataacacaactggtgaaggacacatcggagaagcttaaacaagctagcgaggctgatcatcgtgtcgaagtcagcgccagcaaaaagattgctgatgcgaagctagcaaaggatttccaagcagttctgaaagaatttcagaaagctcaacggttagcggtagaaagagaagctgcttatgcacccttcatttctcaagcgggcttgccacaaagctataactcgagcgaggtgaacaatggtgctgataagttggctgagcaacgcacggcgcttctagaatcaagaaggcaagaattagtcttcttggataatgagatcgtgttcaatgaggccgtcattgaggagagggatcagggaatacaagaaattcagcaccaaattactgaagtaaatgaaatcttcaaagatcttgctgttctagtccacgatcaaggacaaatgattgatgacattgacacccatatcgagaatgctgttatagcgactacacaagcaaaaggccaactctctaaggctgctaaaactcagaagtcgaactcttcgctgatatgcttgttgctggttatattcggggtggtcctgctcatagtgataatcgtcctcgcagcctag

SEQ ID NO: 220 - protein, 280 aa, Oryza sativa
MSFQDLEAGNARGLPRRGGGGRAGAAAAGAGASQAVASGVFQINTAVSTFQRLVNTLGTPKDTPDLRERIHKTRQHITQLVKDTSEKLKQASEADHRVEVSASKKIADAKLAKDFQAVLKEFQKAQRLAVEREAAYAPFISQAGLPQSYNSSEVNNGADKLAEQRTALLESRRQELVFLDNEIVFNEAVIEERDQGIQEIQHQITEVNEIFKDLAVLVHDQGQMIDDIDTHIENAVIATTQAKGQLSKAAKTQKSNSSLICLLLVIFGVVLLIVIIVLAA

SEQ ID NO: 221 - DNA, 1002 bp, Oryza sativa
  CDS (1)..(1002)
atggtgatcaacctagaattcatcagggcgatcgttacggccgatgagatccttctactggatcctctcacgatcgatgtgatcccttttgttgagcaattgacacatcatctccctctcaagaacctggtgtgtgggaatggtcaacctggtggtgatgaccatggggaaaagcatgatgactcgcatggagatcaggtgccccgccttaacgaggccaccggagcagagcacgagttgccatttgaattccaggtgctggagctcgcactcgagaccgtgtgctcatcattcgacgttaacgtgtctggtcttgaaaggcgcgccactccggtacttgaggaactgaccaagaatgtcagcacaaggaatctcgatcgtgtgcgaactctcaagagtgatcttacccgtttgcttgcccatgtgcagaaggtcagagatgaaatagaacatcttctggatgataatgaagacatggcacatctgtatctaacaaggaagcaattacaaaaccagcaagttgaggctttaatatcatcggctgcttccaatagcattgttcctggaggaacaagtctgtccaggttgaacaatagttttcggcgcagcgtgagcatcgctacaagcatgcatttggataatgacgtggaagacctagaaatgttgcttgaggcttacttcatgcaattggatggaattcgcaacagaattttgtcggttcgagagtatattgatgatacagaagactatgtcaatattcaacttgacaaccagcgtaatgaacttattcagcttcagcttacactgactattgcatccttcggcatagctgtcaacaccttcatagctggggcttttgcgatgaacatccagagcaaattgtacagcattgatgatggtagcttcttttggccatttgttgggggcacctcatcgggctgcttcatgatctgcatcgtcttattatggtatgcccggtggaagaagttgctcggtccttga

SEQ ID NO: 222 - protein, 333 aa, Oryza sativa
MVINLEFIRAIVTADEILLLDPLTIDVIPFVEQLTHHLPLKNLVCGNGQPGGDDHGEKHDDSHGDQVPRLNEATGAEHELPFEFQVLELALETVCSSFDVNVSGLERRATPVLEELTKNVSTRNLDRVRTLKSDLTRLLAHVQKVRDEIEHLLDDNEDMAHLYLTRKQLQNQQVEALISSAASNSIVPGGTSLSRLNNSFRRSVSIATSMHLDNDVEDLEMLLEAYFMQLDGIRNRILSVREYIDDTEDYVNIQLDNQRNELIQLQLTLTIASFGIAVNTFIAGAFAMNIQSKLYSIDDGSFFWPFVGGTSSGCFMICIVLLWYARWKKLLGP

SEQ ID NO: 223 - DNA, 702 bp, Oryza sativa
  CDS (1)..(702)
gagggggaggggagggcggcgacggggaagagggagaggatagcaatacggaggatcgacaacctggcggcgaggcaggtgaccttctcgaagcggaggagggggctgttcaagaaggccgaggagctctccatcctctgcgacgccgaggtcgggctcgtcgtcttctccgccaccggcaagctcttccaattcgccagcaccagcatggaacagattattgaccggtacaactcgcattccaagacacttcagagagcagaaccttctcaactcgacttacaaggggaggacagcagtacttgtgccagactaaaggaggagcttgcagaaactagccttaggctgaggcagatgagaggagaggagctgcacaggctgaatgtggaacagctgcaggagctagagaagagcctcgagtccggtctaggctctgttctcaagaccaagagcaagaaaattctggatgagatcgatggactggaacgaaagaggatgcaattgatagaggagaatttaaggctgaaggagcaagtgtccaggatgtcaagaatggaggagatgcagcctgggcctgattcagaaatcgtgtacgaggaagggcagtcgtctgaatctgtcaccaatgcttcttacccgcgacctccacccgacaacgactacagctctgatacatctctcaagctcgggttgcactcttaa

SEQ ID NO: 224 - protein, 233 aa, Oryza sativa
EGEGRAATGKRERIAIRRIDNLAARQVTFSKRRRGLFKKAEELSILCDAEVGLVVFSATGKLFQFASTSMEQIIDRYNSHSKTLQRAEPSQLDLQGEDSSTCARLKEELAETSLRLRQMRGEELHRLNVEQLQELEKSLESGLGSVLKTKSKKILDEIDGLERKRMQLIEENLRLKEQVSRMSRMEEMQPGPDSEIVYEEGQSSESVTNASYPRPPPDNDYSSDTSLKLGLHS

SEQ ID NO: 225 - DNA, 741 bp, Oryza sativa
  CDS (1)..(741)
atggggcggggcaaggtgcagctgaagcggatcgagaacacgatcaaccggcaggtgaccttctccaagcgcaggtcggggctgctcaagaaggcgaatgagatctccgtgctctgcgacgccgaggtcgcgctcatcatcttctccaccaagggcaagctctacaagtacgccaccgactcatgtatggacaaaatccttgaacgttatgagcgctactcctatgcagaaaaggtccttatttcagctgaatctgacactcagggcaactggtgccacgaatataggaaactgaaggctaaggttgagacaatacagaaatgtcaaaagcacctcatgggagaggatcttgaatctttgaatctcaaagagctgcagcagctggagcagcagctggaaaattcgttgaaacatatcagatccagaaagagccaactaatgctcgagtccattaacgagcttcaacggaaggaaaagtcactgcaggaggagaataaggtcctacagaaagaactggtggagaagcagaaagtccagaagcaacaagtgcaatgggaccagacacaacctcaaacaagttcctcatcatcctccttcatgatgagggaagcccttccaacaactaatatcagtaactaccctgcagcagctggcgaaaggatagaggatgtagcagcagggcagccacagcatgttcgcattgggctgccaccatggatgctgagccacatcaacggctaa

SEQ ID NO: 226 - protein, 246 aa, Oryza sativa
MGRGKVQLKRIENTINRQVTFSKRRSGLLKKANEISVLCDAEVALIIFSTKGKLYKYATDSCMDKILERYERYSYAEKVLISAESDTQGNWCHEYRKLKAKVETIQKCQKHLMGEDLESLNLKELQQLEQQLENSLKHIRSRKSQLMLESINELQRKEKSLQEENKVLQKELVEKQKVQKQQVQWDQTQPQTSSSSSSFMMREALPTTNISNYPAAAGERIEDVAAGQPQHVRIGLPPWMLSHING

SEQ ID NO: 227 - DNA, 702 bp, Oryza sativa
  CDS (1)..(702)
atggtgcgggggaggacggagctgaagcggattgagaacccgacgagccggcaggtgaccttctccaagcgccggaatggcctcctcaagaaggcgttcgagctctccgtcctctgcgacgccgaggtcgccctcatcgtcttctccccccgcggccgcctctacgagttcgccagcgcccccagcctacagaaaaccatcgaccgctataaagcatacacaaaggatcatgtcaacaataagacaattcaacaagatatccagcaagtcaaagatgatactttaggtttggccaagaaacttgaagctcttgatgagtccagacggaaaatattgggagaaaatttagaaggatgctctattgaagaactgcgtggtctagaaatgaaacttgagaagagcctccacaacataagactaaagaagaccgagcttctggagcggcagatagccaagctgaaagagaaggagcggactttgcttaaagacaacgaaaatttacgcggaaagcatcgcaaccttgaggctgcggcgctggtggctaaccacatgacgacgacgacggcgccggcggcgtggccgcgggacgtgcctatgacgagcagcacagccggcgccgccgacgccatggacgtggagactgatctgtacattggattgcccggcactgagcgctcctccaaccggtcggagacaggttga

SEQ ID NO: 228 - protein, 233 aa, Oryza sativa
MVRGRTELKRIENPTSRQVTFSKRRNGLLKKAFELSVLCDAEVALIVFSPRGRLYEFASAPSLQKTIDRYKAYTKDHVNNKTIQQDIQQVKDDTLGLAKKLEALDESRRKILGENLEGCSIEELRGLEMKLEKSLHNIRLKKTELLERQIAKLKEKERTLLKDNENLRGKHRNLEAAALVANHMTTTTAPAAWPRDVPMTSSTAGAADAMDVETDLYIGLPGTERSSNRSETG

SEQ ID NO: 229 - DNA, 774 bp, Oryza sativa
  CDS (1)..(774)
atggggagggggaaggtggagctgaagcggatcgagaacaagatcagccggcaggtgacgttcgccaagcgcaggaacggcctgctcaagaaggcctacgagctctccctcctctgcgacgccgaggtcgccctcatcatcttctccggccgcggccgcctcttcgagttctccagctcatcatgcatgtacaaaaccttggagaggtaccgcagctgcaactacaactcacaggatgcagcagctccagaaaacgaaattaattaccaagaatacctgaagctgaaaacaagagttgaatttcttcaaaccacacagagaaatattcttggtgaggatttgggcccactaagcatgaaggagctggagcagcttgagaaccagatagaagtatccctcaaacaaatcaggtcaagaaagaaccaagcactgcttgatcagctgtttgatctgaagagcaaggagcaacagctgcaagatctcaacaaagacttgaggaaaaagttacaggaaaccagtgcagagaatgtgctccatatgtcctggcaagatggtggtgggcacagcggttctagcactgttcttgctgatcagcctcatcaccatcagggtcttctccaccctcacccagatcagggtgaccattccctgcagattgggtatcatcaccctcatgctcaccatcaccaggcctacatggaccatctgagcaatgaagcagcagacatggttgctcatcaccccaatgaacacatcccatccggctggatatga

SEQ ID NO: 230 - protein, 257 aa, Oryza sativa
MGRGKVELKRIENKISRQVTFAKRRNGLLKKAYELSLLCDAEVALIIFSGRGRLFEFSSSSCMYKTLERYRSCNYNSQDAAAPENEINYQEYLKLKTRVEFLQTTQRNILGEDLGPLSMKELEQLENQIEVSLKQIRSRKNQALLDQLFDLKSKEQQLQDLNKDLRKKLQETSAENVLHMSWQDGGGHSGSSTVLADQPHHHQGLLHPHPDQGDHSLQIGYHHPHAHHHQAYMDHLSNEAADMVAHHPNEHIPSGWI

SEQ ID NO: 231 - DNA, 711 bp, Oryza sativa
  CDS (1)..(711)
atggggagggggaagatcgagataaagcggatcgagaacacgacgaaccggcaggtgaccttctgcaagcgccgcaatggcctcctgaagaaggcgtacgagctgtccgtcctctgcgacgccgaggttgccctcatcgtcttctccagccgcgggcgcctctacgagtacgccaacaacagtgtgaaatccaccgttgagaggtacaagaaggcaaacagtgacacctccaactctggcacagttgcagaagtcaatgcccagcactaccagcaggagtcctccaaactgcgccaacaaatcagtagcttacagaacgcaaacagtaggaccatagtgggggattctatcaacaccatgagcctcagggaccttaaacaggtagagaacaggctggagaaaggcatagctaagataagggctagaaagaatgagctgttatatgctgaagttgagtacatgcagaaaagggaagttgagctgcagaatgacaacatgtacctgaggagcaaggttgttgagaatgagaggggacagcagccactgaacatgatgggggcagcatcaacaagtgaatacgatcatatggttaataacccatatgattccaggaactttcttcaagtgaacatcatgcagcagcctcagcattacgcccatcagctgcagccaactacccttcaactcgggcagcagccggccttcaattag

SEQ ID NO: 232 - protein, 236 aa, Oryza sativa
MGRGKIEIKRIENTTNRQVTFCKRRNGLLKKAYELSVLCDAEVALIVFSSRGRLYEYANNSVKSTVERYKKANSDTSNSGTVAEVNAQHYQQESSKLRQQISSLQNANSRTIVGDSINTMSLRDLKQVENRLEKGIAKIRARKNELLYAEVEYMQKREVELQNDNMYLRSKVVENERGQQPLNMMGAASTSEYDHMVNNPYDSRNFLQVNIMQQPQHYAHQLQPTTLQLGQQPAFN

SEQ ID NO: 233 - DNA, 678 bp, Oryza sativa
  CDS (1)..(678)
atggggcgagggaaagtagagctgaagcggatcgagaacaagataagccggcaggtgacgttcgcgaagaggaggaacgggctgctgaagaaggcgtacgagctgtccgtgctctgcgacgccgaggtcgccctcatcatcttctccacccgcggccgcctcttcgagttctccacctcctcctgtatgtacaagacactggagcgataccgcagttgcaactacaaccttaactcatgtgaagcatctgctgcactggaaactgaactaagcaattaccaagagtacttaaagttaaagacaagagttgagttcctacaaacaactcagagaaatcttcttggcgaggacttggttccacttagcttgaaggagctcgagcaacttgagaaccagatcgagatatccctcatgaatatcaggtcatcaaagaatcaacagttgcttgatcaagtatttgagctcaaacgtaaggaacaacaacttcaagatgctaataaagacttaaaaaggaagatacaagaaactagtggagaaaatatgcttcatatatcttgccaagatgtagggcccagtggccatgctagtgaagctaaccaagagtttctccatcatgcaatttgtgacccttccctgcatatagggtatcaagcttacatggatcacctcaaccaatga

SEQ ID NO: 234 - protein, 225 aa, Oryza sativa
MGRGKVELKRIENKISRQVTFAKRRNGLLKKAYELSVLCDAEVALIIFSTRGRLFEFSTSSCMYKTLERYRSCNYNLNSCEASAALETELSNYQEYLKLKTRVEFLQTTQRNLLGEDLVPLSLKELEQLENQIEISLMNIRSSKNQQLLDQVFELKRKEQQLQDANKDLKRKIQETSGENMLHISCQDVGPSGHASEANQEFLHHAICDPSLHIGYQAYMDHLNQ

SEQ ID NO: 235 - DNA, 753 bp, Oryza sativa
  CDS (1)..(753)
atggggaggggaagagttgagctgaagcgcatcgagaacaagatcaacaggcaggtcaccttctccaagcgccgcaacggcctcctcaagaaggcctacgagctgtccgttctctgcgacgccgaggtcgcgctcatcatcttctccagccgcggcaagctctacgagttcggcagcgccggcataacaaagactttagaaaggtaccaacattgttgctacaatgctcaagattccaacaatgcactttctgaaactcagagttggtaccatgaaatgtcaaagttgaaagcaaaatttgaagctttgcagcgcactcaaaggcacttgcttggggaggatcttggaccactcagcgtcaaagaattgcagcagctggagaaacagcttgaatgtgcactatcacaggcgagacagagaaagacgcaactgatgatggaacaggtggaggaacttcgcagaaaggagcgtcagctgggtgaaattaataggcaactcaagcacaagctcgaggttgaaggttccaccagcaactacagagccatgcagcaagcctcctgggctcagggcgccgtggtggagaatggcgccgcatacgtgcagccgccgccacactccgcggccatggactctgaacccaccttgcaaattgggtatcctcatcaatttgtgcctgctgaagcaaacactattcagaggagcactgcccctgcaggtgcagagaacaacttcatgctgggatgggttctttga

SEQ ID NO: 236 - protein, 250 aa, Oryza sativa
MGRGRVELKRIENKINRQVTFSKRRNGLLKKAYELSVLCDAEVALIIFSSRGKLYEFGSAGITKTLERYQHCCYNAQDSNNALSETQSWYHEMSKLKAKFEALQRTQRHLLGEDLGPLSVKELQQLEKQLECALSQARQRKTQLMMEQVEELRRKERQLGEINRQLKHKLEVEGSTSNYRAMQQASWAQGAVVENGAAYVQPPPHSAAMDSEPTLQIGYPHQFVPAEANTIQRSTAPAGAENNFMLGWVL

SEQ ID NO: 237 - DNA, 813 bp, Oryza sativa
  CDS (1)..(813)
atggggaggggcaggattgagatcaagaggatcgagaacacgacaagccgccaggtgaccttctgcaagcgccgcaacgggcttctcaagaaggcgtatgagctctccgtcctctgcgatgccgaggtggctctcatcgtcttctccagccgtggccgcctctacgagtactccaacaacaacaatgtgaaggctacaattgacaggtacaagaaggcgcatgcttgtggctcaacttctggtgcacctctcatagaggtcaatgctcagcaatactaccagcaggagtctgccaaactgcgccaccagattcagatgctgcaaaacaccaacaagcacctggttggcgataatgtgagcaacctgtcactgaaggagctgaagcaacttgaaagccgcctggagaaaggcattgcaaagatcagagccaggaagaatgaactgctggcttcagagatcaattacatggccaaaagggagattgagcttcagaacgacaacatggacctcagaaccaagattgctgaggaggagcagcagctgcagcaggtgacggtggcccggtcggccgccatggagctgcaggctgcggcggcggcgcagcagcagcagcagaatccgttcgcggtggcggcggcgcagttggacatgaagtgcttcttcccgttgaacctgttcgaggcggcggcgcaggtgcaggccgtggcggcgcagcgccagcagatcatccccaccgagctcaacctcggctaccaccaccacctcgccattcccggcgccaccgccgccgacgcgccgcctcctcacttctga

SEQ ID NO: 238 - protein, 270 aa, Oryza sativa
MGRGRIEIKRIENTTSRQVTFCKRRNGLLKKAYELSVLCDAEVALIVFSSRGRLYEYSNNNNVKATIDRYKKAHACGSTSGAPLIEVNAQQYYQQESAKLRHQIQMLQNTNKHLVGDNVSNLSLKELKQLESRLEKGIAKIRARKNELLASEINYMAKREIELQNDNMDLRTKIAEEEQQLQQVTVARSAAMELQAAAAAQQQQQNPFAVAAAQLDMKCFFPLNLFEAAAQVQAVAAQRQQIIPTELNLGYHHHLAIPGATAADAPPPHF

SEQ ID NO: 239 - DNA, 804 bp, Oryza sativa
  CDS (1)..(804)
atggggcgggggaaggtgcagctgaagcggatagagaacaagatcaacaggcaggtgacgttctccaagaggaggaatggattgctgaagaaggcgcacgagatctccgtcctctgcgacgccgaggtcgccgccatcgtcttctcccccaagggcaagctctacgagtacgccactgactccaggatggacaaaatccttgaacgttatgagcgctattcatatgctgaaaaggctcttatttcagctgaatccgagagtgagggaaattggtgccatgaatacaggaaacttaaggcaaagattgagaccatacaaaaatgtcacaaacacctcatgggagaggatcatgaatccctgaatctcaaagaactccaacagctagagcagcagctggagagttcattgaagcacataatatcaagaaagagccaccttatgcttgagtccatttccgagctgcagaaaaaggagaggtcactgcaggaggagaacaaggctctgcagaaggaactggtggagaggcagaagaatgtgaggggccagcagcaagtagggcagtgggaccaaacccaggtccaggcccaggcccaagcccaaccccaagcccagacaagctcctcctcctcctccatgctgagggatcagcaggcacttcttccaccacaaaatatctgctacccgccggtgatgatgggcgagagaaatgatgcggcggcggcggcggcggtggcggcgcagggccaggtgcaactccgcatcggaggtcttccgccatggatgctgagccacctcaatgcttaa

SEQ ID NO: 240 - protein, 267 aa, Oryza sativa
MGRGKVQLKRIENKINRQVTFSKRRNGLLKKAHEISVLCDAEVAAIVFSPKGKLYEYATDSRMDKILERYERYSYAEKALISAESESEGNWCHEYRKLKAKIETIQKCHKHLMGEDHESLNLKELQQLEQQLESSLKHIISRKSHLMLESISELQKKERSLQEENKALQKELVERQKNVRGQQQVGQWDQTQVQAQAQAQPQAQTSSSSSSMLRDQQALLPPQNICYPPVMMGERNDAAAAAAVAAQGQVQLRIGGLPPWMLSHLNA

SEQ ID NO: 241 - DNA, 750 bp, Oryza sativa
  CDS (1)..(750)
atggggagagggccggtgcagctgcggcggatcgagaacaagataaacaggcaggtgaccttctccaagcggaggaacgggctgctgaagaaggcgcacgagatctccgtgctctgtgacgccgacgtcgcgctcatcgtcttctccaccaagggcaagctctacgagttctccagccactccagtatggaagggatccttgaacgctaccagcgttactcgtttgatgaaagagccgtactggagccaaatactgaggaccaggaaaactggggtgatgaatatggaattttgaagtccaaactggatgcacttcagaagagccaaaggcaactcttaggtgaacaattggacacactaacaacaaaagaactccagcaattggaacatcaactggaatattctctgaagcatataagatcaaaaaagaatcagcttctgtttgaatcaatttctgagcttcagaagaaggaaaagtcacttaaaaaccagaataatgttctgcaaaagctcatggagacagaaaaggagaaaaacaatgctataataaacactaaccgggaggagcaaaatggagcaacaccaagcacatcatcaccaacaccagtgacggctccagatcccatcccgacaacaaataacagtcaaagccaaccaagaggatcaggggagtcagaagctcaaccgtctccggcacaagcaggcaacagcaagcttccgccatggatgctccggacaagtcacacatga

SEQ ID NO: 242 - protein, 249 aa, Oryza sativa
MGRGPVQLRRIENKINRQVTFSKRRNGLLKKAHEISVLCDADVALIVFSTKGKLYEFSSHSSMEGILERYQRYSFDERAVLEPNTEDQENWGDEYGILKSKLDALQKSQRQLLGEQLDTLTTKELQQLEHQLEYSLKHIRSKKNQLLFESISELQKKEKSLKNQNNVLQKLMETEKEKNNAIINTNREEQNGATPSTSSPTPVTAPDPIPTTNNSQSQPRGSGESEAQPSPAQAGNSKLPPWMLRTSHT

SEQ ID NO: 243 - DNA, 741 bp, Oryza sativa
  CDS (1)..(741)
atggggcggggcaaggtgcagctgaagcggatcgagaacaagatcaaccggcaggtgaccttctccaagcgcaggtcggggctgctcaagaaggcgaatgagatctccgtgctctgcgacgccgaggtcgcgctcatcatcttctccaccaagggcaagctctacgagtacgccaccgactcatgtatggacaaaatccttgaacgttatgagcgctactcctatgcagaaaaggtccttatttcagctgaatctgacactcagggcaactggtgccacgaatataggaaactgaaggctaaggttgagacaatacagaaatgtcaaaagcacctcatgggagaggatcttgaatctttgaatctcaaagagctgcagcagctggagcagcagctggaaaattcgttgaaacatatcagatccagaaagagccaactaatgctcgagtccattaacgagcttcaacggaaggaaaagtcactgcaggaggagaataaggtcctacagaaagaactggtggagaagcagaaagtccaaaagcaacaattgcaatgggaccagacacaacctcaaacaatttcctcatcatcctccttcatgatgagggaagcccttccaacaactaatatcagtaactaccctgcagcagctggcgaaaggatagaggatgtaccagcagggcagccacagcatgttcgcattgggctgccaccatggatgctgagccacatcaacggctaa

SEQ ID NO: 244 - protein, 246 aa, Oryza sativa
MGRGKVQLKRIENKINRQVTFSKRRSGLLKKANEISVLCDAEVALIIFSTKGKLYEYATDSCMDKILERYERYSYAEKVLISAESDTQGNWCHEYRKLKAKVETIQKCQKHLMGEDLESLNLKELQQLEQQLENSLKHIRSRKSQLMLESINELQRKEKSLQEENKVLQKELVEKQKVQKQQLQWDQTQPQTISSSSSFMMREALPTTNISNYPAAAGERIEDVPAGQPQHVRIGLPPWMLSHING

SEQ ID NO: 245 - DNA, 687 bp, Oryza sativa
  CDS (1)..(687)
atggcgcgggagaggcgggagataaagaggatagagagcgcggcggcgcggcaggtcaccttctccaagcgccggcgcggcctgttcaagaaggccgaggagctctccgtgctctgcgacgccgacgtcgcgctcatcgtcttctcctccacggggaagctatcccacttcgcaagctccagtatgaatgaaatcatcgacaagtacaacacacattctaataatctggggaaagcagaacagccttcgctcgacttgaatttagaacatagcaagtatgcacatttgaatgagcaacttgcggaagctagtctccggcttagacaaatgagaggtgaggagcttgagggattgagcattgatgaactccagcagctagagaagaacctggaagctggtctgcacagggtgatgctgacaaaggatcaacaatttatggagcagatcagtgaactccagcggaagagttcacagctggcagaggagaacatgcaactcagaaaccaggtatcccagatatcaccagctgagaagcaagttgttgatactgaaaattttgttaccgaaggacagtcctctgaatctgtgatgactgcattgcattctggaagttcacagtcgcaggataatgatgatggctcggatgtatccctgaaattagggctgccttgtggtgcatggaagtaa

SEQ ID NO: 246 - protein, 228 aa, Oryza sativa
MARERREIKRIESAAARQVTFSKRRRGLFKKAEELSVLCDADVALIVFSSTGKLSHFASSSMNEIIDKYNTHSNNLGKAEQPSLDLNLEHSKYAHLNEQLAEASLRLRQMRGEELEGLSIDELQQLEKNLEAGLHRVMLTKDQQFMEQISELQRKSSQLAEENMQLRNQVSQISPAEKQVVDTENFVTEGQSSESVMTALHSGSSQSQDNDDGSDVSLKLGLPCGAWK

SEQ ID NO: 247 - DNA, 780 bp, Oryza sativa
  CDS (1)..(780)
ttggttggtggcagctggagatcgatcgggatggggagggggcgggtggagctgaagaggatcgagaacaagatcaaccggaaggtgacgttcgccaagaggaggaatggcctgctcaagaaggcgtacgagctctccgtcctctgcgacgccgaggtcgccctcatcatcttctccaaccgcggcaagctctacgagttctgcagcacccagagcatgactaaaacgcttgagaagtatcagaaatgcagttacgcaggacccgaaacagctgtccaaaatagagaaagtgagcaattgaaagctagccgcaatgaatacctcaaactgaaggcaagggttgaaaatttacaacggactcaaagaaatttgctgggtccagatcttgattcattaggcataaaagagctcgagagcctagagaagcagcttgattcatccctgaagcacgtcagaactacaaggacaaaacatctggtcgaccaactgacggagcttcagagaaaggaacaaatggtttctgaagcaaatagatgccttaggagaaaactggaggaaagcaaccatgttcgcgggcagcaagtgtgggagcagggctgcaacttaattggctatgaacgtcagcctgaagtgcagcagcctcttcacggcggcaatgggttcttccatccacttgatgctgctggtgaacccacccttcagattgggtaccctgcagagcatcatgaggcgatgaacagtgcgtgcatgaacacctacatgcccccatggctaccatga

SEQ ID NO: 248 - protein, 259 aa, Oryza sativa
LVGGSWRSIGMGRGRVELKRIENKINRKVTFAKRRNGLLKKAYELSVLCDAEVALIIFSNRGKLYEFCSTQSMTKTLEKYQKCSYAGPETAVQNRESEQLKASRNEYLKLKARVENLQRTQRNLLGPDLDSLGIKELESLEKQLDSSLKHVRTTRTKHLVDQLTELQRKEQMVSEANRCLRRKLEESNHVRGQQVWEQGCNLIGYERQPEVQQPLHGGNGFFHPLDAAGEPTLQIGYPAEHHEAMNSACMNTYMPPWLP

SEQ ID NO: 249 - DNA, 747 bp, Oryza sativa
  CDS (1)..(747)
atggggagagggagggtggagctgaagaggatcgagaacaagatcaacaggcaggtgacgttcgcgaagcggaggaatgggctgctcaagaaggcgtacgagctctccgtgctctgcgacgccgaggtcgccctcatcatcttctccaaccgcggcaagctctacgagttctgcagcggccaaagcatgaccagaactttggaaagataccaaaaattcagttatggtgggccagatactgcaatacagaacaaggaaaatgagttagtgcaaagcagccgcaatgagtacctcaaactgaaggcacgggtggaaaatttacagaggacccaaaggaatcttcttggtgaagatcttgggacacttggcataaaagagctagagcagcttgagaaacaacttgattcatccttgaggcacattagatccacaaggacacagcatatgcttgatcagctcactgatctccagaggagggaacaaatgttgtgtgaagcaaataagtgcctcagaagaaaactggaggagagcaaccagttgcatggacaagtgtgggagcacggcgccaccctactcggctacgagcggcagtcgcctcatgccgtccagcaggtgccaccgcacggtggcaacggattcttccattccctggaagctgccgccgagcccaccttgcagatcgggtttactccagagcagatgaacaactcatgcgtgactgccttcatgccgacatggctaccctga

SEQ ID NO: 250 - protein, 248 aa, Oryza sativa
MGRGRVELKRIENKINRQVTFAKRRNGLLKKAYELSVLCDAEVALIIFSNRGKLYEFCSGQSMTRTLERYQKFSYGGPDTAIQNKENELVQSSRNEYLKLKARVENLQRTQRNLLGEDLGTLGIKELEQLEKQLDSSLRHIRSTRTQHMLDQLTDLQRREQMLCEANKCLRRKLEESNQLHGQVWEHGATLLGYERQSPHAVQQVPPHGGNGFFHSLEAAAEPTLQIGFTPEQMNNSCVTAFMPTWLP

SEQ ID NO: 251 - DNA, 750 bp, Oryza sativa
  CDS (1)..(750)
atggggaggggaagggttgagctgaagcgcatcgagaacaagatcaaccggcaggtcaccttctccaagcgccgcaacggcctcctcaagaaggcgtacgagctctccgtgctctgcgacgcggaggtggcgctcatcatcttctccagccgcggcaagctgtacgaattcggtagcgccggaataaacaagacattggaaaagtacaatagttgctgttacaacgctcaaggttcaaatagtgctcttgctggtggtgaacatcagagctggtaccaagagatgtcaaggctcaagactaagcttgaatgtctccaacgctctcagaggcacatgcttggtgaagatcttggaccattgagcataaaggaactgcagcagctggagaagcaacttgagtactcactgtcacaggctcgacaacgaaagacacaaatcatgatggagcaggtcgacgatcttcgccggaaggaacgccagcttggagagctcaataagcaactgaaaaacaagctagaagctgaagccgatagcagcaactgcagatcagccatccaggattcctgggtccatggcaccgtcgtcagtggcggcagagtgctgaatgctcaaccaccaccagatattgactgtgagcctactctgcaaattgggtactatcaatttgtccgtcctgaggcggccaatccaagaagcaatggaggaggaggggatcagaacaacaactttgtgatgggatggcccctctga

SEQ ID NO: 252 - protein, 249 aa, Oryza sativa
MGRGRVELKRIENKINRQVTFSKRRNGLLKKAYELSVLCDAEVALIIFSSRGKLYEFGSAGINKTLEKYNSCCYNAQGSNSALAGGEHQSWYQEMSRLKTKLECLQRSQRHMLGEDLGPLSIKELQQLEKQLEYSLSQARQRKTQIMMEQVDDLRRKERQLGELNKQLKNKLEAEADSSNCRSAIQDSWVHGTVVSGGRVLNAQPPPDIDCEPTLQIGYYQFVRPEAANPRSNGGGGDQNNNFVMGWPL

SEQ ID NO: 253 - DNA, 471 bp, Oryza sativa
  CDS (1)..(471)
atgaagatcattttcgtatttgctctccttgctattgttgcatgcaacgcttctgcacggtttgatgctcttagtcaaagttatagacaatatcaactacaatcgcatctcctgctacagcaacaagtgctcagcccatgcagtgagttcgtaaggcaacagcatagcatagtggcaacccccttctggcaaccagctacgtttcaattgataaacaaccaagtcatgcagcaacagtgttgccaacagctcaggctggtagcgcaacaatctcactaccaggccattagtagcgttcaggcgattgtgcagcaactacagctgcagcaggtcggtgttgtctactttgatcagactcaagctcaagctcaagctttgctggccttaaacttgccatccatatgtggtatctatcctaactactacattgctccgaggagcattcccaccgttggtggtgtctggtactga

SEQ ID NO: 254 - protein, 156 aa, Oryza sativa
MKIIFVFALLAIVACNASARFDALSQSYRQYQLQSHLLLQQQVLSPCSEFVRQQHSIVATPFWQPATFQLINNQVMQQQCCQQLRLVAQQSHYQAISSVQAIVQQLQLQQVGVVYFDQTQAQAQALLALNLPSICGIYPNYYIAPRSIPTVGGVWY

SEQ ID NO: 255 - DNA, 471 bp, Oryza sativa
  CDS (1)..(471)
atgggttggcgttggcacgacgacggcgatgacggcggccgcggcctgggcgacatccccgacctcgccggcggcggcggaggcggagatggggagcgctgcgccacgcgccgggtggtgcagtctcggtgccacacggaggaggtggagcccggccgcttcgtccgcaagtgcgagaagaccgagcagctcctccgcgactgcgtcggcagtgacatagaagctcttgagaaaggccttttcgggagcattggtagctttctggatgatgctgagaggatgaccaatgatttcttgaagtcttttggtgtcccttccatcaatgaaagggagtcgagctcatttgatggacaacctacaggcaggcacattggtggacaacctgcaggcaggcacattgaggaaggtactgcaaaggacactaaacagaacgactacgcagaattcagcagcaagattacagatgtgtaa

SEQ ID NO: 256 - protein, 156 aa, Oryza sativa
MGWRWHDDGDDGGRGLGDIPDLAGGGGGGDGERCATRRVVQSRCHTEEVEPGRFVRKCEKTEQLLRDCVGSDIEALEKGLFGSIGSFLDDAERMTNDFLKSFGVPSINERESSSFDGQPTGRHIGGQPAGRHIEEGTAKDTKQNDYAEFSSKITDV

SEQ ID NO: 257 - DNA, 618 bp, Oryza sativa
  CDS (1)..(618)
ctcgacctcttcatgacccattatgtattgctcctttgttcgttcaaggaacaactacagcaacatgtgcgtgttcatgcaatggaagcagtaatggcttgctgggaacttgaacaaactttacagagccttacaggggcatctcctcgtgaaggttctggagcaactatgtctgatgacgaagacaatcaggttgatagtgagagcaacatgtttgatggaaatgatggatcagatggtatgggctttggccccttaatgctgacggagggcgagagatcattagttgagcgtgtacggcaagagctgaaacatgagcttaaacaggggtacagagaaaagcttgtggacattagggaagagatactccgaaagcgaagagctggaaaactcccaggagatacagcgtctactttgaaagcatggtggcaggctcactctaaatggccatacccaactgaggaggacaaggctcgcttggtgcaggaaacagggttgcaactaaaacagatcaataattggtttatcaaccaacgtaaacggaactggcacagcaatcctgcttcatcctcatcagacaaaagcaagagaaaaaggtatcgtgtcgtggacttctaa

SEQ ID NO: 258 - protein, 205 aa, Oryza sativa
LDLFMTHYVLLLCSFKEQLQQHVRVHAMEAVMACWELEQTLQSLTGASPREGSGATMSDDEDNQVDSESNMFDGNDGSDGMGFGPLMLTEGERSLVERVRQELKHELKQGYREKLVDIREEILRKRRAGKLPGDTASTLKAWWQAHSKWPYPTEEDKARLVQETGLQLKQINNWFINQRKRNWHSNPASSSSDKSKRKRYRVVDF

SEQ ID NO: 259 - DNA, 2370 bp, Oryza sativa
  CDS (1)..(2370)
atggattcgactaagcaagatttccaaccccggacattctccatcaaactgtggccaccaagtgaaagcactcgtctcatgcttgtggagaggatgaccaagaacctttccacagagtccatattttctcgcaagtacggccttttgggcaaggaagaggctcatgataatgctaaaaggatcgaagaggtatgctttgcctctgcagacgagcatttcaaggaggagcctgatggggatgggagttctgctgtccagctgtacgcaaaggaaactagcaagttgatgctggaagttctgaaaagagggccaaggaccactgtggaaccagaagtacctgttgctgatacacctcttgagcctgctgattctgtatttgatatatctggtggcaagcgtgcgtttattgaggcagatgaagcgaaggaacttttgagcccgcttatcaaaccaggaaatgcatataaacggatttgcttcagcaacaggagctttggtattggtgctgccaatgttgctggacctattctggaatcaatcaaaaagcaactcacagaggtggatatatcagattttgttgctggcagacctgaggatgaagcccttgatgtgatgcgcatcttctcaaaagctttagaaggcgctgtactgagatacttgaacatctctgataatgctttaggtgagaagggtgtcagagcatttgaagagctcctgaaatcacaggacaacctggaagaactatatgtgatgaatgatggtatatcagaggaagccgcacaagctctttctgaacttattccttcaactgagaagcttaagatcctccacttccacaacaatatgacgggggatgaaggtgctatgtttattgctgagatggttaaacgttctcctaatctagagagtttcaggtgctcagcaacaaggataggatctgatggtggggtggctctggctgaggcattagggacctgtactcgtctgaagaaacttgatctcagggacaacttgtttggagttgaggcagggttggctctcagcaaaaccctttcaaaacttcctgatcttgttgagctgtatctcagtgatctcaatcttgagaacaagggcactgtagcaattatcaataccctcaaacagtcagcaccccagttggaggtccttgaaatggctgggaatgaaattaacgccaaagcatcccaagctttagcagaatgcctgacagcaatgcaatcacttaagaagttgaccttggcagagaatgaactgaaggatgatggtgctgtggtgattgcaaaatcactggaagatggacaccaggatctgaaggagcttgatgttagcacgaatatgctgcagagggtgggagctcggtgctttgcccaggcaatcgcaaacaagccaggttttgtgcaactgaacataaacgggaatttcatctcggacgaagggattgatgaggtgaaagatattctgaagagtggtgagaactctgtggaggtgcttggtccactagatgagaacgaccctgagggggaggctgaagatgatgaggaagaggaagaggaggaagaggatgacgatcaacggcgtggattgcgccaccggagcccgcatccgcatccaccacctccgctcgcaatcactctacaacagatcggaaacctcgcgggcggcggcggcggcggcgcgggtaagcgagcggacaccggcgacgagcgcgaggaggaggaggaggaggaaggagaagatggcggcgacgctgtcgcagctcgacgacgggatcgtccgcgggatggccatcggcgcggtattcaccgactacgctgggaagataaactgcctcgacttccaccgcaaggaggatctcctcgtcacctccagcgaggacgactccatacgcctctacaacatcaccagcgccacttttacctatgttctgtttcccctggggcatcttgttcgttagaccttcatattgttagatcgttgcagtacgtggatgcgagagtgggtccctttgacactttcttggttggtggagatacagctgaagtttctgacatcaaatttagcaatgatggcaagtccatgcttttgacaacaaccaacaaccatatatatgttctggatgcatatggaggggataagaggtgtggctttagtctggagtcatctcccaatgtagcaactgaagctgcttttactccagatggccaatatgtaatttcagattgcttgttggaacagtcacatcggtcctatcactgctttgaagtgggctccccgtcgagcaatgtttgcaactgcgtcaactgccctaactttctggattcccaacaattccagttcgaattaggtgcctag

SEQ ID NO: 260 - protein, 789 aa, Oryza sativa
MDSTKQDFQPRTFSIKLWPPSESTRLMLVERMTKNLSTESIFSRKYGLLGKEEAHDNAKRIEEVCFASADEHFKEEPDGDGSSAVQLYAKETSKLMLEVLKRGPRTTVEPEVPVADTPLEPADSVFDISGGKRAFIEADEAKELLSPLIKPGNAYKRICFSNRSFGIGAANVAGPILESIKKQLTEVDISDFVAGRPEDEALDVMRIFSKALEGAVLRYLNISDNALGEKGVRAFEELLKSQDNLEELYVMNDGISEEAAQALSELIPSTEKLKILHFHNNMTGDEGAMFIAEMVKRSPNLESFRCSATRIGSDGGVALAEALGTCTRLKKLDLRDNLFGVEAGLALSKTLSKLPDLVELYLSDLNLENKGTVAIINTLKQSAPQLEVLEMAGNEINAKASQALAECLTAMQSLKKLTLAENELKDDGAVVIAKSLEDGHQDLKELDVSTNMLQRVGARCFAQAIANKPGFVQLNINGNFISDEGIDEVKDILKSGENSVEVLGPLDENDPEGEAEDDEEEEEEEEDDDQRRGLRHRSPHPHPPPPLAITLQQIGNLAGGGGGGAGKRADTGDEREEEEEEEGEDGGDAVAARRRDRPRDGHRRGIHRLRWEDKLPRLPPQGGSPRHLQRGRLHTPLQHHQRHFYLCSVSPGASCSLDLHIVRSLQYVDARVGPFDTFLVGGDTAEVSDIKFSNDGKSMLLTTTNNHIYVLDAYGGDKRCGFSLESSPNVATEAAFTPDGQYVISDCLLEQSHRSYHCFEVGSPSSNVCNCVNCPNFLDSQQFQFELGA

SEQ ID NO: 261 - DNA, 2856 bp, Oryza sativa
  CDS (1)..(2856)
atgttcaagtcggcgcggtggcgcggcggcggcgggggcggggggaaggcgaaggcggtgccggaggtgggatgggaggcgatgatggtggtggtgacgccgcgggacgcgggccggccgacggcgaggacggagagcgcgcaggtcgccgacggcgcgtgccagtggcccgccccggtctacgaggccaccaagctcccttcctccggcaaggacaagatctaccagttcctcgtctacgacacggtgcgttccctctcctcgccgccaccgcccaccgccaccgacaccgccattactcacccccccgcttctcgcttgcccgtcatgtgctcgacgatttgtctcacccgccgcacaatgcagggctcgaccaaggcggcgctgctcggggaggcgacgctgaacctgtccgagtacgccgacgcgttcaagccgtggatcgtcacgctgccgctcagcggcagccccggcgcgcagctgcacgtgaccatccagcgggtggtgggtggtggtggcggcggcggcggtgggtgcggtgacgacgccagtgagaacggcggcgacgtgtcgccggtggtggcgaggacgccgccgaggaagacgctgcagagccagctgagccggtgcgaggacgaggaggcggagaaggcgagggcggcggcggcggcggcggatgcgatgagccctatgcaagagggcaccaataccctctcacccctgaggaacacattgaccagctccggtgactggtcgggaagctcagctcctgatgctagcaccgacgggtcaaccagcaactccggtgaggcggggttgagggaggcagaggatgatgtggagaagctaagaagtgagatagccactttgacgcggaaattggatgtctccgatatggagttgcaaacactgagaaagcaaattgtgaaggagagtcgacgagggcaagatctttccaaggaagtgggtagcttgagggatgagagggatgctctcagaagagaatgtgaagcactcagagggatgaaaaagactatccatgatgcaaacggatctggtaaaagactatcaagcggggaagacccgtggtcgcagattgaagagctaaagcaagaactgggccatgagaagaatctaaatggagatctgcatttacaattgcagaaaatgcaggaatccaactctgagctacttctggctgtgaaggatcttgatgagatgctggagcagaagaacaaggagatatcacttttgcatgaagaaacactggaggatccccaggaggctgaatatgagctagcattgtcaaatgtgcataatgctggacacaaaatagacatatctgaaacaagttcagttcaagagaaagaagatgagctgatgctggatgcattggcaaagacaaccgatggcatcgctacctctgaacttcaaaataaaattgttgagctgagcaatgaaatcgagttgtataagaaggaccgtgaagacctcgagatgcaaatggagcaacttgcacttgactatgagatcctgaagcaagagaaccatgacatctcttctaggctggagcaaacacagttgagggagcagctaaggatgcagtacgagtgttcagcacatttgtctataataagcgatcttgaagccaatgttgagagcctggagaatgaactccaggaacaatccaaaagattagaggctgacatacaagaggtaatgcgtgcaaaggttgaacaagagcaaagggccataaaggccgaggagtccctgaggaaagcaagatggaacaatgccactactgctgaacgactccaggaggaattcaagatgttgtcttcacaagtttcctctgctttcagcgcaaatgaacagttgcttatgcaagctagaaaagaggctgcagagctacagttacagaagggccagttggaagaattactacagaaggcacaagaagatcttggatcaatccaagaacaacaccgagtgaaggttcaacagttactgaccttagtggatttcaagtcaaaggagacagacaggctggtaatggagcttaaaagcaagagtgatgagttccagaatcagaagagatgcaacgaagcaaagttaagtgttctctcagaagaaatagatcaactcaaagctaagattgagaatctgtcaaatgaacgagacaatctcttcgaagagaatgagcagaaggacaaggaattagctgcaaattgtcaaaaggatatgttcttgcaggatagagatgctgagatagctttgctcaacaaagaacttgcttcaatcaaggaccaagtgcagacatatttagaggagataaacactttaaaaagttcaaagaatgaaaaggaggagatgatcgagaagctgcaatcagagattagatcgttgaaattcgagtatgacaacctgaaaattttgatgtccactaacgactctgagaaacacaaccttgcttcccaagtgctgaagcttcggagagcccttgaaagcagggaggatgtgaaacaaaatggtgtcaaatcagatgaggacaaccaccatgctacttctaagcgcatcaagcatgacgacggcaccaccgggagctgtaacgtgctgccaagcaccaacagacacaatgcaaatggtgactgcaatgggcatgacaggagggatgcagctcatgatcagtcggtaaaggagctggaaatcctgaaggagaggaacactgcactggaggaagagctcaaagaactgcacgggcggtactcggagataagcctgaaattcgcggaagtcgaaggcgagaggcagcagctggtgatgacggtgcgcgccctgaagaactccctgaggtga

SEQ ID NO: 262 - protein, 951 aa, Oryza sativa
MFKSARWRGGGGGGGKAKAVPEVGWEAMMVVVTPRDAGRPTARTESAQVADGACQWPAPVYEATKLPSSGKDKIYQFLVYDTVRSLSSPPPPTATDTAITHPPASRLPVMCSTICLTRRTMQGSTKAALLGEATLNLSEYADAFKPWIVTLPLSGSPGAQLHVTIQRVVGGGGGGGGGCGDDASENGGDVSPVVARTPPRKTLQSQLSRCEDEEAEKARAAAAAADAMSPMQEGTNTLSPLRNTLTSSGDWSGSSAPDASTDGSTSNSGEAGLREAEDDVEKLRSEIATLTRKLDVSDMELQTLRKQIVKESRRGQDLSKEVGSLRDERDALRRECEALRGMKKTIHDANGSGKRLSSGEDPWSQIEELKQELGHEKNLNGDLHLQLQKMQESNSELLLAVKDLDEMLEQKNKEISLLHEETLEDPQEAEYELALSNVHNAGHKIDISETSSVQEKEDELMLDALAKTTDGIATSELQNKIVELSNEIELYKKDREDLEMQMEQLALDYEILKQENHDISSRLEQTQLREQLRMQYECSAHLSIISDLEANVESLENELQEQSKRLEADIQEVMRAKVEQEQRAIKAEESLRKARWNNATTAERLQEEFKMLSSQVSSAFSANEQLLMQARKEAAELQLQKGQLEELLQKAQEDLGSIQEQHRVKVQQLLTLVDFKSKETDRLVMELKSKSDEFQNQKRCNEAKLSVLSEEIDQLKAKIENLSNERDNLFEENEQKDKELAANCQKDMFLQDRDAEIALLNKELASIKDQVQTYLEEINTLKSSKNEKEEMIEKLQSEIRSLKFEYDNLKILMSTNDSEKHNLASQVLKLRRALESREDVKQNGVKSDEDNHHATSKRIKHDDGTTGSCNVLPSTNRHNANGDCNGHDRRDAAHDQSVKELEILKERNTALEEELKELHGRYSEISLKFAEVEGERQQLVMTVRALKNSLR

SEQ ID NO: 263 - DNA, 1929 bp, Oryza sativa
  CDS (1)..(1929)
atggctacttactactcgagccctggcaatgaaagggactcgcaagctatgtacccagcggattcaggcaattcatcatatcctgtgccatcagcaataggaaacatgttatatcctggcaatgggtcttctgggccatacacggaattcagtggcattatccagcatcagcagaatttcatggagctgcctggccatccaactgcgatctctcaagattcatcgtcacgggaacctaacatggtcgcgtcgtacatggatcagcgctcttttggacctgccaaagatatgagaaatgagatgttgatgcatctgatggatggagcacataatgctggtgctgatctcatccacaatgacactcatagcagcgcgcagattgagtttggcctattgaacaaccacaattcgatgagcgttgcaccagcaccaggccaaggattgtctctgagcctcaacacgcatatcctggcgccttcgtatccatactggtctgcgaaaacagagttgctaacaccacactcttaccatggtgatgacaacagaatgaagaatatgcaatctgaggcctcacaggcaatcagaaactcaaagtatctgaaagcagcacaagaattgcttgatgaggtcgtcagtgtttggaagagtataaagcagaaggctcagaaagaccaggctgaagcaggaaaatcagataacaaagaagccgaggggggttcgaaaggtgagggggtatcttccaacccacaggagtctactgccaatgctgcaccagagatttctgctgctgagaaacaagagctccagaataagatggcaaaacttatggccatgttggatgaggtggaccgaaagtacaaacactattatcatcaaatgcaaattgtagtctcatcttttgatatggttgctgggtctggagctgccaagccttatactgcagtggcccttcagacaatctcaaaacatttcagatgtctgaaagatgctatcaacgatcagatcaatgttatccggaagaaacttggagaggaggagagttcatctggcaaagagggaaaattaacgcgcctccgttatattgaccagcaattaagacaacagcgcgctttccagcagtatggtttgttacagcaaaatgcttggaggccacagaggggactgcccgaaaactcagtttcaattcttcgtgcttggctttttgaacacttccttcacccgtatccaaaagattcagaaaagctgatgctagcgagacaaactggcttaacaagaagtcagatttcaaattggttcataaatgcccgtgtccgcctgtggaaaccgatgatcgaagacatgtataaagaagagattggggaggcggatctcgactcgaactcctcctccgacaacgtaccaaggagcaaggacaaaatagcaacatctgaagataaggaagatctgaaaagctctatgagccagacttatcaaccaagccaattaggtgaatccaaagccaacatcgggatgatgagccttggtggggcaccagccggcttccacaacgaaggcaaccaggatgacagcttcatgaacctaatgctgaaggaccaaaggccgggcgaagccgaaggcagcctcctccatgatgccgtcgcccatcattccgatgagaacgctcggttcatggcttaccatttgtcggggctcggaagatacgggaacagcaatgtgtcattgacacttggcttacagcatcctgacaacaggctttcggtacagaacactcatcagccaggtttcgccggtgctggagaagaaatttacaactccaccgcttctctcggtgtcgctgcagcttcctcttcggactacgaatccacgaaccaaatagatcaaaggcaacggttcgaaccatcgcctctaatgcatgattttgtggcctaa

SEQ ID NO: 264 - protein, 642 aa, Oryza sativa
MATYYSSPGNERDSQAMYPADSGNSSYPVPSAIGNMLYPGNGSSGPYTEFSGIIQHQQNFMELPGHPTAISQDSSSREPNMVASYMDQRSFGPAKDMRNEMLMHLMDGAHNAGADLIHNDTHSSAQIEFGLLNNHNSMSVAPAPGQGLSLSLNTHILAPSYPYWSAKTELLTPHSYHGDDNRMKNMQSEASQAIRNSKYLKAAQELLDEVVSVWKSIKQKAQKDQAEAGKSDNKEAEGGSKGEGVSSNPQESTANAAPEISAAEKQELQNKMAKLMAMLDEVDRKYKHYYHQMQIVVSSFDMVAGSGAAKPYTAVALQTISKHFRCLKDAINDQINVIRKKLGEEESSSGKEGKLTRLRYIDQQLRQQRAFQQYGLLQQNAWRPQRGLPENSVSILRAWLFEHFLHPYPKDSEKLMLARQTGLTRSQISNWFINARVRLWKPMIEDMYKEEIGEADLDSNSSSDNVPRSKDKIATSEDKEDLKSSMSQTYQPSQLGESKANIGMMSLGGAPAGFHNEGNQDDSFMNLMLKDQRPGEAEGSLLHDAVAHHSDENARFMAYHLSGLGRYGNSNVSLTLGLQHPDNRLSVQNTHQPGFAGAGEEIYNSTASLGVAAASSSDYESTNQIDQRQRFEPSPLMHDFVA

SEQ ID NO: 265 - DNA, 2955 bp, Oryza sativa
  CDS (1)..(2955)
atggcgaccttcgcgaaacctgagaacgcgctcaagagagcggaggagttgatacatgttgggcagaagcaggcagcgctacaggcgttacatgatctcatcacttcaaaaagatacaggtcatggcaaaagccactcgaaaggattatgatgaagtatgtggagctctgtgtagacctgaggaagggcaggtttgcgaaagatggccttattcagtacaggattgtctgccagcaagtgaatgtgtcatccttggaggaggtgataaaacacttcatgcagctttccaatgagaaagcagagcaagcaaggaaccaggcgcaagcactggaagatgccctggatgtagaagatctggaagcagacaagcggcctgaggatttgatgctcagctatgtcagcggggagaaagggaaggaccgatcagacagagagcatgtcacaccatggttcaagtttctctgggaaacatacagaacagttcttgagatattgagaaacaattcaaagcttgaagcattatatgctatgactgctcacaaggcttttcaattttgtaagcagtataagagaacgactgaattccgtaggttgtgcgagataataagaaatcatcttgctaacttgaacaaataccgtgaccagcgagatcgtcctgatctgactgccccagaaagcttacagctatacctggacactagagttgaacaactaaaaattgctacagagctctctctctggcaggaggcctttaggtctgtggaagacatccatggcttgatgagcatggtgaagaaaacaccaaaaccatctgtcctggttgtgtattatgccaagttgactgaaatattctggatatctgattgccacttgtatcatgcatatgcatggcttaagctattctacttgcagaaaagctacaataagaacttgtctcagaaggaccttcaattaatagcttcttctgttttgcttgctgcacttgccgtgtcaccatatgaccataaatatggcgcatctcatcttgagcttgaaaatgagaaagatcgtaatctgcggatagctaatctcgtcaacttctcccttgactccaagcgtgagaatagagaagtgccatcaagagcatctcttttttctgagctggctgccaaaggtgtcattgcctgtgcttcacaagatgtcaaagatttatacaaccttttggaacacgattttcttcctctggatctcgtatccaaagcacagccactgctatctaagatttcaaagattggagggaagctttcatcagctcccttggttccagaagtttttctgtcacagtaccttcctgctttggagaagttaacaactttaagggtgttgcaacaggcttcccagatatttcagtctgtgaaaattgatatgctctcaagaatgatcccattctttgacttttctgttgttgagaagatctctgttgatgccgtgaaacacaattttgttgctatgaaagtcaaccatttatcaggagctgtccattttgggaaaatggacattgaatctgattgtctcagtaatcacctaagtgttttggctgattctctaaataaagcaaggagccttatccatccacctgtgaagaagccatccaagcttggtgaaaacttaacgagtcttgctgcagtagtggagaatgagcacaagcgtcttcttgcgaggaaatcaattattgaaaaacgcaaagaagatcttgagcgccaaatattggaaaaggaaaaggaagaagaaaaaaagagattgagtgttctcaagaaatctgcagaagatgaaaggataaggcttctcaatgatgtaaaattgagggaacaggagaggatccgtcgacaattggttgaaaaagaaaagatagaggcagaagaactgcttcagaaacagataaaggagatagcaaagagaggaggaaaaaaacctgtccttcagggggaagttactaaggaggctgtgatggaattggctatgaatgagcagtttaaggagcgccaagagatggagaaaaaactacagaagactggtaagcaaatggattacttggagagggcaaaaaggcaggaagaggcacctctaattgagcaagcttttcaaaaacgccttgaagtagagaaaatccttcatgagcaagagcagctgagagagattgagctcagcaagcaacaccatgcaggtgacctgcaggagaagaacagactttctcgaatgttggagcataagaacattttccaggaaagaattgtccaacgtcgtgaagctgagtttagtcgtcttaagaaagagagggatgaaaggactagtcaattgatatcatcaaggaagcgtgaaagggatacagtgcggaagttaatgtactatcttaacttagaagagcagcgcctccaaaggctccgtgaggaagaggaagctagaaaacaggaagagaggagaaagagggaagagactgagaggaaggctaagctggatgcaattgcagccaagcagctgcagagagagagggaactagaagagaagaaggaaaaacagagaatggaagctctcatgggaagaggagctggagctgctgagcctgcacgcactcctgatgctgctccggttgcacagccagctcagccggtagctgcaccggctgctgctgctgccgctgctgcaccagctgctggtaagtatgtcccgaagtttaaacgaggtggtgatggtggcagtagtgctggcggccagagacctgctgtggcacctgagcaagaccgttggggttcacgggatgatcgcccacgtcctgatatgcgtccgctccgccaagaggcaccccctgctcgcgatgctgctcccccagcccgccaagatggtcctccaggcacatggcgaccttcaagatactcaagttcatcatcttcctcaacctggagcagcaggcgcaactga

SEQ ID NO: 266 - protein, 984 aa, Oryza sativa
MATFAKPENALKRAEELIHVGQKQAALQALHDLITSKRYRSWQKPLERIMMKYVELCVDLRKGRFAKDGLIQYRIVCQQVNVSSLEEVIKHFMQLSNEKAEQARNQAQALEDALDVEDLEADKRPEDLMLSYVSGEKGKDRSDREHVTPWFKFLWETYRTVLEILRNNSKLEALYAMTAHKAFQFCKQYKRTTEFRRLCEIIRNHLANLNKYRDQRDRPDLTAPESLQLYLDTRVEQLKIATELSLWQEAFRSVEDIHGLMSMVKKTPKPSVLVVYYAKLTEIFWISDCHLYHAYAWLKLFYLQKSYNKNLSQKDLQLIASSVLLAALAVSPYDHKYGASHLELENEKDRNLRIANLVNFSLDSKRENREVPSRASLFSELAAKGVIACASQDVKDLYNLLEHDFLPLDLVSKAQPLLSKISKIGGKLSSAPLVPEVFLSQYLPALEKLTTLRVLQQASQIFQSVKIDMLSRMIPFFDFSVVEKISVDAVKHNFVAMKVNHLSGAVHFGKMDIESDCLSNHLSVLADSLNKARSLIHPPVKKPSKLGENLTSLAAVVENEHKRLLARKSIIEKRKEDLERQILEKEKEEEKKRLSVLKKSAEDERIRLLNDVKLREQERIRRQLVEKEKIEAEELLQKQIKEIAKRGGKKPVLQGEVTKEAVMELAMNEQFKERQEMEKKLQKTGKQMDYLERAKRQEEAPLIEQAFQKRLEVEKILHEQEQLREIELSKQHHAGDLQEKNRLSRMLEHKNIFQERIVQRREAEFSRLKKERDERTSQLISSRKRERDTVRKLMYYLNLEEQRLQRLREEEEARKQEERRKREETERKAKLDAIAAKQLQRERELEEKKEKQRMEALMGRGAGAAEPARTPDAAPVAQPAQPVAAPAAAAAAAAPAAGKYVPKFKRGGDGGSSAGGQRPAVAPEQDRWGSRDDRPRPDMRPLRQEAPPARDAAPPARQDGPPGTWRPSRYSSSSSSSTWSSRRN

SEQ ID NO: 267 - DNA, 840 bp, Oryza sativa
  CDS (1)..(840)
atggggaggcagccgtgctgcgacaaggttgggctgaagaagggtccatggacggcggaggaggaccagaagctcgtcagcttcctcctcggcaacggccaatgctgctggcgtgccgtccccaagctcgccgggttgctccggtgtgggaagagctgccggctccggtggacgaactacctccggccggacctgaagcgtggtctcctgtcggagacggaggagaagacggtgatcgacctgcacgagcagctcggcaacaggtggtccaagatcgcgtcgcacctgccgggcaggacggacaacgagatcaagaaccactggaacacgcacatcaagaagaagctccggaagatggggatcgaccccgtcacacacaagcccctctaccctgctccgccgctggccgacggcggctcgccggagcagaaggtgccggaggaggaggaggaggtggaggagaagtcgtctgctgccgtggaaagctcgacgagcacctgcgccggccacgacgtgttctgcaccgacgaggtgcccatgctgcacctggacgacatcgtcctcccgccgccgtgcgacgtcgtcggcgacaccgccggctcgccggcagagtcgtcgtccacgtcgacgtcgtcgagcggcggcggcggcatcgacgaggagtggctgctgccgatcatggagtggccggagtcgatgtacctgatggggctcgacgacgtcgacatggtcaccacggcggcgccggcgatggcgacgtcgtgggagttcgaggatccgttcaacgcgtaccagaggatcgcgttgtttgatcaccaccacgagctgacgtgggcttga

SEQ ID NO: 268 - protein, 279 aa, Oryza sativa
MGRQPCCDKVGLKKGPWTAEEDQKLVSFLLGNGQCCWRAVPKLAGLLRCGKSCRLRWTNYLRPDLKRGLLSETEEKTVIDLHEQLGNRWSKIASHLPGRTDNEIKNHWNTHIKKKLRKMGIDPVTHKPLYPAPPLADGGSPEQKVPEEEEEVEEKSSAAVESSTSTCAGHDVFCTDEVPMLHLDDIVLPPPCDVVGDTAGSPAESSSTSTSSSGGGGIDEEWLLPIMEWPESMYLMGLDDVDMVTTAAPAMATSWEFEDPFNAYQRIALFDHHHELTWA

SEQ ID NO: 269 - DNA, 1002 bp, Oryza sativa
  CDS (1)..(1002)
atggcagatgctagttcgaggactgacacatcaacagtcctggataccgacgataagaatcagatggtagacgggcaaagtggagctattgtgccttctaattcatctgatcggtctgacagatctgacaagcccatggaccaaaaggtgttacgccggcttgctcaaaatcgtgaggctgcaagaaaaagtcggctgagaaaaaaggcatatgtacaacaattagagagcagtaagctgaaacttgcaagcttggagcaagagatcaataaagctcgccaacaaggaatttacatttcgagctcaggagaccaaactcatgctatgagtggaaatggagctatgacttttgatttagaatatgcccgttggttggaggaacaaaacaagcagataaatgagctgaggactgcagtaaatgctcatgcaagtgacagcgacctccgtctcattgtagatgggataatggcgcattacgatgagatattcaggctgaagggtgttgccgcaaaggctgatgtgtttcatatactttcaggcatgtggaaaacacctgctgaaaggtgcttcttgtggcttgggggttttcgttcctctgagcttctaaagcttcttgtgaatcagctcgagccattaactgagcagcagttgttgggactatcgaacctccaacagtcctctcagcaggctgaagatgctctatcacagggaatggaagcgttgcaacaatccttggcagatacgttggccgggtcccttggtccatcaggatcttcagggaacgtggcaaactacatgggtcaaatggctatggccatgggcaaacttgggacccttgagaatttcctccgtcaggctgacaatttgcggcagcagactttacatcaaatgcagcgaattctgacaatccgacaagctgcccgtgctctacttgcaatacatgattacttctcacgtttgcgtgccctgagttctctctggcttgctaggccacgggagtaa

SEQ ID NO: 270 - protein, 333 aa, Oryza sativa
MADASSRTDTSTVLDTDDKNQMVDGQSGAIVPSNSSDRSDRSDKPMDQKVLRRLAQNREAARKSRLRKKAYVQQLESSKLKLASLEQEINKARQQGIYISSSGDQTHAMSGNGAMTFDLEYARWLEEQNKQINELRTAVNAHASDSDLRLIVDGIMAHYDEIFRLKGVAAKADVFHILSGMWKTPAERCFLWLGGFRSSELLKLLVNQLEPLTEQQLLGLSNLQQSSQQAEDALSQGMEALQQSLADTLAGSLGPSGSSGNVANYMGQMAMAMGKLGTLENFLRQADNLRQQTLHQMQRILTIRQAARALLAIHDYFSRLRALSSLWLARPRE

SEQ ID NO: 271 - DNA, 1890 bp, Oryza sativa
  CDS (1)..(1890)
atgagtcatagttcggatgaagattcggaaatcagtgattctgagatcgacgagtatgcagacaaattttatgcacgactggtggcaggggaattcaaagtaaaggatgggcagagttacagctgcccattttgcagtggcaagaagaagaaagatttcaacataaacaatcttattcagcatgcctcgggagtaggcgctgcgtctaatcggcaggctaaagataaggcaacccatcgtgcccttgccaagcacttgaagaatggcctcactaagtcgtcaggacaacagtcacagacagctgttgtggagccacaaccgcttccaaacagagatgagaagttcgtgtggccctggatgggtgttctagttaatgtgcctaccgaatggaaggatgggcgccaaattggacgaagtggaaatcatttgaaggagcaactgtcacgcttttgcccacttaagatcattccattatggaattttagaggtcattcagggaatgctattgttgagtttggaaaagattggcatggcttcagaaatgcgcttgcctttgaagattactttgggaaagaaggatatggtaggagggactggaaggagaaacagaatcaagggtcaaacctctttggatgggttgcaagagctgaagatcacacttctccagggctaataggcgaccatttaagaaaaaatggtgacctgaagactatcaatgatcttgagaatgaaggagcacgtaaaactgacaaacttgtagctaatttagcaaaccaaattgaggtaaagaacaggcatttgcaggaacttgaagttacatacaatgaaagaactacatcacttgagaagatgatggggcaaagggaacagcttctccagaaatataatgaagaaattcgcaagatgcagcagctagctcagagacattctcagaagataatcgatgagaatcaaaagctgcgttctgaactggagtccaagatgagtgaacttaatacgagatccaaggagcttgatgagattgctgcaaaaagtgattatgaccgaaggatcattgatcaagagaagcagaagaatgctatcaaatcaagccatcttaagttggcaacgttggaacaagagagagctgatgaaaatgtgctgaagcttgtaagagaacataagagagagaaagaagctgctgtaaagaaaattttgaagttagaacagcaggtggatgcaaaacaaaagcttgaattagatatacagcagttaaagggcaaattggaagtgatgaagcatatgccaggggatgaagattcagcattgaaaaataaaattgatgaattgagtgaggagctgcaagaaaagatggatgaactagatgctatggagtcacttaaccaaactttggttattaaagaaagaaaaagcaatactgaaatgcaagatgccaggaaggagcttgaaaatggcttacttgatctcttagatggtcaatcacatataggaataaagagaatgggcgagcttgatctggaagcattttcaaaagcatgcagaaagatgtcatcggaagaggatgcagagattactgctgccattctttgttcaaagtggcaagctgaaattaaaaatcctgattggcacccttttaggtttgtcttggttgatgggcaggagaaggaaattatcgaggatgatgccaaacttcaagaattaaaagaagagcatggcgaagacatatacagattggtgagggacgcgctgtgtgaaattaatgagtacaaccctagcggcagattcccagtaggagagctgtggaacttcaaggataaacggaaggccactctgaaggaaacggtccagttcgtcctgagacagtggcgagcgaacaggaggaagcgctaa

SEQ ID NO: 272 - protein, 629 aa, Oryza sativa
MSHSSDEDSEISDSEIDEYADKFYARLVAGEFKVKDGQSYSCPFCSGKKKKDFNINNLIQHASGVGAASNRQAKDKATHRALAKHLKNGLTKSSGQQSQTAVVEPQPLPNRDEKFVWPWMGVLVNVPTEWKDGRQIGRSGNHLKEQLSRFCPLKIIPLWNFRGHSGNAIVEFGKDWHGFRNALAFEDYFGKEGYGRRDWKEKQNQGSNLFGWVARAEDHTSPGLIGDHLRKNGDLKTINDLENEGARKTDKLVANLANQIEVKNRHLQELEVTYNERTTSLEKMMGQREQLLQKYNEEIRKMQQLAQRHSQKIIDENQKLRSELESKMSELNTRSKELDEIAAKSDYDRRIIDQEKQKNAIKSSHLKLATLEQERADENVLKLVREHKREKEAAVKKILKLEQQVDAKQKLELDIQQLKGKLEVMKHMPGDEDSALKNKIDELSEELQEKMDELDAMESLNQTLVIKERKSNTEMQDARKELENGLLDLLDGQSHIGIKRMGELDLEAFSKACRKMSSEEDAEITAAILCSKWQAEIKNPDWHPFRFVLVDGQEKEIIEDDAKLQELKEEHGEDIYRLVRDALCEINEYNPSGRFPVGELWNFKDKRKATLKETVQFVLRQWRANRRKR

SEQ ID NO: 273 - DNA, 165 bp, Oryza sativa
  CDS (1)..(165)
atggtgcagctcctccagctcgccatcgactgctcggcgcagcaccccgacaggcggccgtccatgtccgaggtggccgcgaggatcgacgagatccgccgctccagcctcggcgaccgtccggccaccgacagcgccggcgagggcgaggagccttcactataa

SEQ ID NO: 274 - protein, 54 aa, Oryza sativa
MVQLLQLAIDCSAQHPDRRPSMSEVAARIDEIRRSSLGDRPATDSAGEGEEPSL

SEQ ID NO: 275 - DNA, 894 bp, Oryza sativa
  CDS (1)..(894)
atgcagcagcagcagcagcacctccaccaccagccgtcgccgccggcgggcgcggcgtcgacgtggcagctgcagcagggtgcgtggcatctccgcggctcaaggttcctcctcccgacgcagcagctcctgcaggagttctgcagcctccccgtgaagagcaccaccagcccatcatcggcaagcaaggcaaccaaaccgccgcaagaagaggccgccagcggcggaggctcgtcgtcgtggaccgcgccgacgcagatccagtccatggacgcggccgagctgcagcggctcaagggcaagctctacaccatgctcgaagaggtggataggaggtacaggaggtactgcgagcagatgagggcgctcgcggcgtcgttcgaggcggtggccggggagagggcggcggcgtcgtacacgcggctggcgtcgaggacgatctcgaggcacttccggagcctgagggacggggtggtggcgcagctgcaggcggtgcggaagcagctcggggagaaggacacggcggtgcccgggatgaccaagggcgagacgccccgcctccgggtgctcgaccagtgcctccgccagcacaaggcctaccaggccggcatgctcgagagccacccatggcgcccccagcgcggcctccccgagcgcgccgtctccatcctccgtgcctggctcttcgagcacttccttcacccgtacccaagcgacgtggataagcacatcctcgcgaggcagaccgggctatcacgtagtcaagtggcgaattggttcatcaacgcgagggtgaggctgtggaagccaatggtggaggagatgtacgcggaggagatgaaggacgaggagggcagtggacagtccacgcaggcgagcaaccccggacgcgtg

SEQ ID NO: 276 - protein, 298 aa, Oryza sativa
MQQQQQHLHHQPSPPAGAASTWQLQQGAWHLRGSRFLLPTQQLLQEFCSLPVKSTTSPSSASKATKPPQEEAASGGGSSSWTAPTQIQSMDAAELQRLKGKLYTMLEEVDRRYRRYCEQMRALAASFEAVAGERAAASYTRLASRTISRHFRSLRDGVVAQLQAVRKQLGEKDTAVPGMTKGETPRLRVLDQCLRQHKAYQAGMLESHPWRPQRGLPERAVSILRAWLFEHFLHPYPSDVDKHILARQTGLSRSQVANWFINARVRLWKPMVEEMYAEEMKDEEGSGQSTQASNPGRV

SEQ ID NO: 277 - DNA, 771 bp, Oryza sativa
  CDS (1)..(771)
atgtctcgggaggagaatgtctacatggccaagctggccgagcaggctgaaaggtatgaggagatggttgagtacatggagaaggttgcaaagactgtagatgtggaagagctcactgttgaggagcgcaacctcttgtctgttgcttacaagaatgtgattggtgcccgccgtgcctcctggcgtattgtctcatccattgaacagaaggaggagggtcgtggcaatgaggaacatgttactctgatcaaggagtaccgtggcaagattgaagctgagctgagcaagatttgcgatggtatcctgaagttgcttgactcacaccttgtgccctcatctactgctgcagaatctaaggtgttttacctcaagatgaagggtgattaccacaggtaccttgcggaatttaagactggtgccgagagaaaggaagctgctgagagcacaatggtggcttacaaggctgctcaggatattgctctggcggatcttgctcccacccatcccataaggcttggactggcacttaacttctctgtgttctactacgagattctaaactctccagacaaggcttgcaaccttgctaagcaggcgtttgacgaagccatctccgagttggataccctcggggaggagtcttacaaggacagcactttgatcatgcagctcctgagggacaacttgaccctctggacctctgacctcacggaggacggtggtgatgaggtgaaagaagcctccaagggcgacgcctgcgagggccagtaa

SEQ ID NO: 278 - protein, 256 aa, Oryza sativa
MSREENVYMAKLAEQAERYEEMVEYMEKVAKTVDVEELTVEERNLLSVAYKNVIGARRASWRIVSSIEQKEEGRGNEEHVTLIKEYRGKIEAELSKICDGILKLLDSHLVPSSTAAESKVFYLKMKGDYHRYLAEFKTGAERKEAAESTMVAYKAAQDIALADLAPTHPIRLGLALNFSVFYYEILNSPDKACNLAKQAFDEAISELDTLGEESYKDSTLIMQLLRDNLTLWTSDLTEDGGDEVKEASKGDACEGQ

SEQ ID NO: 279 - DNA, 1536 bp, Oryza sativa
  CDS (1)..(1536)
atggcgtccaacgccgcggctgcggcggcggtgtccctggaccaggccgtggcggcgtcggcggcgttctcgtcgcggaagcagctgcggctgcccgccgcggcgcgcggggggatgcgggtgcgggtgcgggcgcgggggcggcgggaggcggtggtggtggcgtccgcgtcgtcgtcgtcggtggcagcgccggcggcgaaggcggaggagatcgtgctccagcccatcagggagatctccggggcggttcagctgccagggtccaagtcgctctccaacaggatcctcctcctctccgccctctccgagggcacaacagtggtggacaacttgctgaacagtgaggatgttcactacatgcttgaggccctgaaagccctcgggctctctgtggaagcagataaagttgcaaaaagagctgtagtcgttggctgtggtggcaagtttcctgttgagaaggatgcgaaagaggaagtgcaactcttcttggggaacgctggaactgcaatgcgaccattgacagcagccgtgactgctgctggtggaaatgcaacttatgtgcttgatggagtgccacgaatgagggagagaccgattggtgacttggttgtcgggttgaaacaacttggtgcggatgtcgactgtttccttggcactgaatgcccacctgttcgtgtcaagggaattggaggacttcctggtggcaaggttaagctctctggttccatcagcagtcagtacttgagtgccttgctgatggctgctcctttggcccttggggatgtggagatcgaaatcattgacaaactaatctccattccttacgttgaaatgacattgagattgatggagcgttttggtgtgaaggcagagcattctgatagttgggacagattctatattaagggagggcagaagtacaaatctcctggaaatgcctatgttgaaggtgatgcctcaagcgcgagctatttcttggctggtgctgcaatcactggaggcactgtgacagttcaaggttgtggtacgaccagtttgcagggtgatgtcaaatttgctgaggtacttgagatgatgggagcaaaggttacatggactgacaccagtgtaaccgtaactggtccaccacgtgagccttatgggaagaaacacctgaaagctgttgatgtcaacatgaacaaaatgcctgatgttgccatgacccttgccgttgttgcactcttcgctgatggtccaactgctatcagagatgtggcttcctggagagtaaaggaaaccgaaaggatggttgcaattcggaccgagctaacaaagctgggagcatcggttgaagaaggtcctgactactgcatcatcaccccaccggagaagctgaacatcacggcaatcgacacctacgatgatcacaggatggccatggccttctccctcgctgcctgcgccgacgtgcccgtgacgatcagggaccctggttgcacccgcaagaccttccccaactacttcgacgttctaagcactttcgtcaggaactga

SEQ ID NO: 280 - protein, 511 aa, Oryza sativa
MASNAAAAAAVSLDQAVAASAAFSSRKQLRLPAAARGGMRVRVRARGRREAVVVASASSSSVAAPAAKAEEIVLQPIREISGAVQLPGSKSLSNRILLLSALSEGTTVVDNLLNSEDVHYMLEALKALGLSVEADKVAKRAVVVGCGGKFPVEKDAKEEVQLFLGNAGTAMRPLTAAVTAAGGNATYVLDGVPRMRERPIGDLVVGLKQLGADVDCFLGTECPPVRVKGIGGLPGGKVKLSGSISSQYLSALLMAAPLALGDVEIEIIDKLISIPYVEMTLRLMERFGVKAEHSDSWDRFYIKGGQKYKSPGNAYVEGDASSASYFLAGAAITGGTVTVQGCGTTSLQGDVKFAEVLEMMGAKVTWTDTSVTVTGPPREPYGKKHLKAVDVNMNKMPDVAMTLAVVALFADGPTAIRDVASWRVKETERMVAIRTELTKLGASVEEGPDYCIITPPEKLNITAIDTYDDHRMAMAFSLAACADVPVTIRDPGCTRKTFPNYFDVLSTFVRN

SEQ ID NO: 281 - DNA, 1167 bp, Oryza sativa
  CDS (1)..(1167)
atggcgtctgctactctcctcaagtcatctttccttcccaagaagtctgaatggggtgccacccgccaggctgccgcccccaagccggtgactgtctccatggttgtccgcgctggtgcctacgacgatgagcttgtcaagaccgcgaaaaccattgcatcaccaggaaggggtatccttgccatggatgagtcgaacgcgacctgcggtaagaggcttgcgtcaattggccttgagaacaccgaggccaaccgccaggcttaccggaccctccttgtcaccgcaccgggcttgggacagtacatctccggtgctatcctcttcgaggagactctgtaccagtcaactgtagatggcaagaagattgtcgacatcctcactgagcagaaaatcgttccaggtatcaaggtcgacaagggtcttgtgccccttgctggctccaacaacgagtcatggtgccaaggtcgcgacggccttgcctcgcgcgaggcggcatactaccagcagggcgctcgcttcgccaagtggcgcactgttgtcagcatccccaacggcccatctgaactcgccgtgaaggaggctgcctggggccttgcccgctacgccgccatttctcaggacaacgggctggtgccgattgtcgagcctgagatcctcctcgacggtgagcatggcatcgacaggaccttcgaggtggcgcagaaggtgtgggcggagaccttcttctacatggccgagaacaatgtgatgttcgagggcatcctcctcaagccaagcatggtgacacccggtgccgagtgcaaggacagggccacccctgagcaagtatctgactacaccctcaagctcctccacagaaggatcccccctgccgtccccgcgatcatgttcttgtcgggtgggcagtcggaggtggaggcgacgcagaacctgaacgcgatgaaccaggggcccaacccgtggcacgtgtcgttctcgtacgcgagggcgctgcagaacacgtgcctcaagacgtggggcgggcagccggagaacgtgaaggcggcgcaggaccgcctgctcctccgcgccaaggccaactcgctggcgcagctcggcaagtacaccagcgacggcgaggccgccgaggccaaggagggcatgttcgtcaagaactacgtctactaa

SEQ ID NO: 282 - protein, 388 aa, Oryza sativa
MASATLLKSSFLPKKSEWGATRQAAAPKPVTVSMVVRAGAYDDELVKTAKTIASPGRGILAMDESNATCGKRLASIGLENTEANRQAYRTLLVTAPGLGQYISGAILFEETLYQSTVDGKKIVDILTEQKIVPGIKVDKGLVPLAGSNNESWCQGRDGLASREAAYYQQGARFAKWRTVVSIPNGPSELAVKEAAWGLARYAAISQDNGLVPIVEPEILLDGEHGIDRTFEVAQKVWAETFFYMAENNVMFEGILLKPSMVTPGAECKDRATPEQVSDYTLKLLHRRIPPAVPAIMFLSGGQSEVEATQNLNAMNQGPNPWHVSFSYARALQNTCLKTWGGQPENVKAAQDRLLLRAKANSLAQLGKYTSDGEAAEAKEGMFVKNYVY

SEQ ID NO: 283 - DNA, 1434 bp, Oryza sativa
  CDS (1)..(1434)
atgtcaccacaaacagaaactaaagcaagtgttggatttaaagctggtgttaaggattataaattgacttactacaccccggagtacgaaaccaaggacactgatatcttggcagcattccgagtaactcctcagccgggggttccgcccgaagaagcaggggctgcagtagctgccgaatcttctactggtacatggacaactgtttggactgatggacttaccagtcttgatcgttacaaaggccgatgctatcacatcgagcccgttgttggggaggataatcaatatatcgcttatgtagcttatccattagacctatttgaagagggttctgttactaacatgtttacttccattgtgggtaacgtatttggtttcaaagccctacgcgctctacgtctggaggatctgcgaattccccctacttattcaaaaactttccaaggtccgcctcatggtatccaagttgaaagggataagttgaacaaatacggtcgtcctttattgggatgtactattaaaccaaaattgggattatctgcaaaaaattatggtagagcatgttatgagtgtctacgcggtggacttgattttaccaaagatgatgaaaacgtaaactcacaaccatttatgcgttggagggaccgttttgtcttttgtgccgaagctatttataaatcacaggccgaaaccggtgaaattaaggggcattacttgaatgcgactgcaggtacatgcgaagaaatgattaaaagagctgtatttgcgagggaattaggggttcctattgtaatgcatgactacttaaccggggggttcaccgcaaatactagtttggctcattattgccgcgacaacggcctacttcttcacattcaccgagcaatgcatgcagttattgatagacagaaaaatcatggtatgcatttccgtgtattagctaaagcattgcgtatgtctgggggagatcatatccacgctggtacagtagtaggtaagttagaaggggaacgcgaaatgactttaggttttgttgatttattgcgcgatgattttattgaaaaagatcgtgctcgcggtatctttttcactcaggactgggtatccatgccaggtgttataccggtggcttcagggggtattcatgtttggcatatgccagctctgaccgaaatctttggagatgattctgtattgcaatttggtggaggaactttaggacatccttggggtaatgcacctggtgcagcagctaatcgggtggctttagaagcctgtgtacaagctcgtaacgaagggcgcgatcttgctcgtgaaggtaatgaaattatccgatcagcttgcaaatggagtcctgaactagccgcagcttgtgaaatatggaaagcgatcaaattcgagttcgagccggtagataaactagatagctag

SEQ ID NO: 284 - protein, 477 aa, Oryza sativa
MSPQTETKASVGFKAGVKDYKLTYYTPEYETKDTDILAAFRVTPQPGVPPEEAGAAVAAESSTGTWTTVWTDGLTSLDRYKGRCYHIEPVVGEDNQYIAYVAYPLDLFEEGSVTNMFTSIVGNVFGFKALRALRLEDLRIPPTYSKTFQGPPHGIQVERDKLNKYGRPLLGCTIKPKLGLSAKNYGRACYECLRGGLDFTKDDENVNSQPFMRWRDRFVFCAEAIYKSQAETGEIKGHYLNATAGTCEEMIKRAVFARELGVPIVMHDYLTGGFTANTSLAHYCRDNGLLLHIHRAMHAVIDRQKNHGMHFRVLAKALRMSGGDHIHAGTVVGKLEGEREMTLGFVDLLRDDFIEKDRARGIFFTQDWVSMPGVIPVASGGIHVWHMPALTEIFGDDSVLQFGGGTLGHPWGNAPGAAANRVALEACVQARNEGRDLAREGNEIIRSACKWSPELAAACEIWKAIKFEFEPVDKLDS

SEQ ID NO: 285 - DNA, 1401 bp, Oryza sativa
  CDS (1)..(1401)
atggctgctgccttctcctccaccgttggagctccggcgtccactccgaccaacttcctggggaagaagctgaagaagcaggtgacatcggcggtgaactaccatggcaagagctccaacatcaacaggttcaaggtgatggccaaggagctggacgagggcaagcagaccgaccaggacaggtggaagggtctcgcctacgacatctccgatgaccagcaggacatcaccagggggaagggtttcgtcgactcccttttccaggctcccacgggtgatggcacccacgaggccgtcctcagctcctacgagtacctcagccagggtctcagaacgtacgacttcgacaacaccatgggaggcttctacatcgcccctgctttcatggacaagctcgtcgtccacatctccaagaacttcatgaccctccccaacatcaaggtcccactcatcctgggtatctggggaggcaagggtcagggaaaatccttccagtgtgagctcgtcttcgccaagatggggatcaaccccatcatgatgagcgccggagagctggagagcggcaacgccggagagccggcgaagctgatcaggcagcggtaccgtgaggcggcagacatcatcaagaaggggaagatgtgctgcctcttcatcaacgatctggacgcgggtgcaggtcgcatgggaggcaccacccagtacacggtgaacaaccagatggtgaacgccaccctgatgaacatcgccgacaacccaaccaacgtgcagctccccgggatgtacaacaaggaggacaacccccgtgtccccatcatcgtcaccggcaacgacttctccacgctgtacgcgccgctcatccgtgacgggcgtatggagaagttctactgggctcccacccgcgacgaccgtgtcggcgtctgcaagggtatcttccgcaccgacaacgtccccgacgaggacatcgtcaagatcgtcgacagcttcccaggccaatccatcgatttcttcggcgctcttcgtgcccgtgtttacgacgacgaggtgcgcaagtgggtgtcggacacgggtgtggagaacattggcaagaggctggtgaactcgagggagggcccaccggagttcgagcagcccaagatgacgatcgaaaagctcatggagtacggatacatgcttgtgaaggagcaggagaacgtcaagcgtgtgcagctggctgagcagtacttgagcgaggctgctcttggtgacgctaactccgacgccatgaagactggttccttctacgggcaaggagcacagcaagcaggtaacctgcctgtgccggaaggttgcaccgaccctgttgccaagaacttcgacccaacggcgaggagcgacgacggcagctgcctttacaccttttaa

SEQ ID NO: 286 - protein, 466 aa, Oryza sativa
MAAAFSSTVGAPASTPTNFLGKKLKKQVTSAVNYHGKSSNINRFKVMAKELDEGKQTDQDRWKGLAYDISDDQQDITRGKGFVDSLFQAPTGDGTHEAVLSSYEYLSQGLRTYDFDNTMGGFYIAPAFMDKLVVHISKNFMTLPNIKVPLILGIWGGKGQGKSFQCELVFAKMGINPIMMSAGELESGNAGEPAKLIRQRYREAADIIKKGKMCCLFINDLDAGAGRMGGTTQYTVNNQMVNATLMNIADNPTNVQLPGMYNKEDNPRVPIIVTGNDFSTLYAPLIRDGRMEKFYWAPTRDDRVGVCKGIFRTDNVPDEDIVKIVDSFPGQSIDFFGALRARVYDDEVRKWVSDTGVENIGKRLVNSREGPPEFEQPKMTIEKLMEYGYMLVKEQENVKRVQLAEQYLSEAALGDANSDAMKTGSFYGQGAQQAGNLPVPEGCTDPVAKNFDPTARSDDGSCLYTF

SEQ ID NO: 287 - DNA, 1002 bp, Oryza sativa
  CDS (1)..(1002)
atggcagcatcgctccaagccgcggccaccctgatgcagccggccaagctcggcggccgggcctcctccgccgcgctgccatcgcgcccgtcttcgcacgtcgccagggcgttcggcgtcgacaccggtgccgccggcaggatcacgtgctccctgcagtccgacatccgggaggtcgccaacaagtgcgccgatgccgccaagctcgccggcttcgccctcgccacctcagctctgctcgtctcgggcgccagcgcggagggcgtgccgaggaggcttaccttcgacgagattcagagtaagacgtacatggaggtgaagggaaccggcacggcgaaccagtgcccgacggtggagggcggcgtcgactccttcgccttcaaggccggcaagtacaacatgaagaagttctgcctggagccgacgtccttcaccgttaaggcggagggcgtggccaagaacgcgccacccgagttccagaagaccaagctcatgacccgcctgacctacaccctcgacgagatcgagggcccgctcgaggtcagctccgacggaaccatcaagttcgaggagaaggacggaatcgactacgccgccgtcaccgtgcagctgccgggaggcgagcgcgtgccgttcctcttcaccatcaagaatctggtcgccaccggcaagccggagagcttcggcgggcccttcctcgtgcccagctaccgtggttcgtccttcctcgacccaaagggccgcggtggctctaccggctacgacaacgctgtggcgctccccgccggaggcagaggagacgaggaggagctcgctaaggagaacgtcaagaacgcctcgtcgtcgacgggcaacatcacgttgagcgtcaccaagagcaagccagagaccggcgaggtgattggcgtcttcgagagcgtgcagccgtcggacacagacctcggcgccaaggtgcccaaggatgtcaagatccaaggggtgtggtacgcgcagctcgagtag

SEQ ID NO: 288 - protein, 333 aa, Oryza sativa
MAASLQAAATLMQPAKLGGRASSAALPSRPSSHVARAFGVDTGAAGRITCSLQSDIREVANKCADAAKLAGFALATSALLVSGASAEGVPRRLTFDEIQSKTYMEVKGTGTANQCPTVEGGVDSFAFKAGKYNMKKFCLEPTSFTVKAEGVAKNAPPEFQKTKLMTRLTYTLDEIEGPLEVSSDGTIKFEEKDGIDYAAVTVQLPGGERVPFLFTIKNLVATGKPESFGGPFLVPSYRGSSFLDPKGRGGSTGYDNAVALPAGGRGDEEELAKENVKNASSSTGNITLSVTKSKPETGEVIGVFESVQPSDTDLGAKVPKDVKIQGVWYAQLE

SEQ ID NO: 289 - DNA, 381 bp, Oryza sativa
  CDS (1)..(381)
atgatcacctcgccgctggtggcgccggcccgggccaagggccttccgtccatctcccgccggggatcctccttcgccatcgtctgcagcggtgggaagaagatcaagaccgacaagccctacgggattggaggtggcatgtcagtcgatattgatgcatctggcaggaaaagcacggggaagggtgtgtaccaattcgttgacaagtacggcgcaaacgtcgacggctacagcccaatctactcgccggaggaatggtctcccaccggtgacacctacgttggtggaaccaccgggcttctgatctgggccgtgaccctcgccgggctcctcggcggcggcgccctcctcgtctacaacaccagcgccctcgccggctaa

SEQ ID NO: 290 - protein, 126 aa, Oryza sativa
MITSPLVAPARAKGLPSISRRGSSFAIVCSGGKKIKTDKPYGIGGGMSVDIDASGRKSTGKGVYQFVDKYGANVDGYSPIYSPEEWSPTGDTYVGGTTGLLIWAVTLAGLLGGGALLVYNTSALAG

SEQ ID NO: 291 - DNA, 345 bp, Oryza sativa
  CDS (1)..(345)
atgccgagggccacgagcgatgcgaagcttctaattcagtccctgggcaaggcttatgctgccacaccaacaaatctcaagatcattgacctctatgtggtctttgcagtcgccactgcccttattcaggttgtttacatgggaatagtggggtcatttcctttcaactctttcctttctggcgtcctctcatgcataggaactgcagtcctcgctgtttgccttcgtattcaagttaacaaagataacaaggaattcaaggatcttcctcctgaaagggcgtttgcagatttcgttctgtgcaatctggtgctccacttggtgatcatgaacttccttggttga

SEQ ID NO: 292 - protein, 114 aa, Oryza sativa
MPRATSDAKLLIQSLGKAYAATPTNLKIIDLYVVFAVATALIQVVYMGIVGSFPFNSFLSGVLSCIGTAVLAVCLRIQVNKDNKEFKDLPPERAFADFVLCNLVLHLVIMNFLG

SEQ ID NO: 293 - DNA, 786 bp, Oryza sativa
  CDS (1)..(786)
  misc_feature (226)..(226): Xaa at amino acid position 226 stands for Leu, or Phe.
  misc_feature (678)..(678): m is a or c
atggctggggcctctgccaaggtcgtcgcgatgctgctctccgtgctcgccacgtacggcttcgccgccggcgtcgtctacaccaacgactggctcccggccaaggccacctggtacggccagcccaacggcgccggacccgacgacaacggcggtgcgtgcgggttcaagaacaccaaccagtacccgttcatgtccatgacctcctgcggcaacgagcctctgttccaggacggcaagggctgtggcgcctgctaccagatacggtgcaccaacaacccgtcgtgctccgggcagcccaggacggtgatcatcacggacatgaactactaccccgtggccaggtaccacttcgacctgagcggcacggcgttcggcgccatggcgaggccggggctgaacgaccagctccgccacgccggcatcatcgacatccagttcaggcgcgtcccgtgctaccaccgcggcctctacgtgaacttccacgtcgaggccgggtccaacccggtgtacctcgccgtgctggtggagttcgccaacaaggacggcacggtggtgcagctcgacgtcatggagtcgctccccagcggcaagccgacgcgggtctggacgcccatgcgccgctcctggggatccatctggcgcctcgacgccaaccaccgcctccagggccccttmtccctccgcatggtcagcgagtccggccagaccgtcatcgcccaccaggtcatcccggccaactggagggccaacaccaactacggctccaaagtccagttccgttga

SEQ ID NO: 294 - protein, 261 aa, Oryza sativa
  misc_feature (226)..(226): The 'Xaa' at location 226 stands for Leu, or Phe.
MAGASAKVVAMLLSVLATYGFAAGVVYTNDWLPAKATWYGQPNGAGPDDNGGACGFKNTNQYPFMSMTSCGNEPLFQDGKGCGACYQIRCTNNPSCSGQPRTVIITDMNYYPVARYHFDLSGTAFGAMARPGLNDQLRHAGIIDIQFRRVPCYHRGLYVNFHVEAGSNPVYLAVLVEFANKDGTVVQLDVMESLPSGKPTRVWTPMRRSWGSIWRLDANHRLQGPXSLRMVSESGQTVIAHQVIPANWRANTNYGSKVQFR

SEQ ID NO: 295 - DNA, 831 bp, Oryza sativa
  CDS (1)..(831)
atggcgttccggctgagcaacagcctgctcgggatcctgaacgcggtgacgttcctcctgtcggtgcccgtgctgggcggcggcatctggctggcgacgcgcgccgacggcacggagtgcgagcgctacttctcggcgccggtgatcgcgttcggggtgttcctcctcctcgtctccctcgcgggcctcgtcggcgcctgctgccgcgtcaactgcctcctctggttctacctcgtcgccatgttcgtcctcatcgtcgtcctcttctgcttcaccgtcttcgccttcgtcgtcaccaacaagggcgccggcgaggccgtctccggcagagggtacaaggagtacaggctcggcgactactccaactggctgcagaagcggatggagaacagcaagaactggaacaggatcaggagctgcctccaggactccaaggtctgcaagaaactgcaggacaagaactgggatcggacccagttcttcaaagccgacctctccccgctcgagtccggatgctgcaagccacccagcagctgcaacttcctctacgtcagcggcacgaactggacgaaggtgcccaccaactcgtcggacccggactgcaacacgtgggtcgacgacggcacgcagctgtgctacaactgccagtcgtgcaaggccggcgcggtggcgaccctgaagcgggactggaagcgcgtcgccgtcgtctgcatcgtcttcctcgtcttcatcgtcatcgtctactccctcggctgctgcgcgttcaggaacaaccggagggacaaccgcggcgcctatcgcggtgccgcgtggaagggcggatacgcctga

SEQ ID NO: 296 - protein, 276 aa, Oryza sativa
MAFRLSNSLLGILNAVTFLLSVPVLGGGIWLATRADGTECERYFSAPVIAFGVFLLLVSLAGLVGACCRVNCLLWFYLVAMFVLIVVLFCFTVFAFVVTNKGAGEAVSGRGYKEYRLGDYSNWLQKRMENSKNWNRIRSCLQDSKVCKKLQDKNWDRTQFFKADLSPLESGCCKPPSSCNFLYVSGTNWTKVPTNSSDPDCNTWVDDGTQLCYNCQSCKAGAVATLKRDWKRVAVVCIVFLVFIVIVYSLGCCAFRNNRRDNRGAYRGAAWKGGYA

SEQ ID NO: 297 - DNA, 1482 bp, Oryza sativa
  CDS (1)..(1482)
atggacgcctccgccggaggcggggggaactcgctgccgacggcgggggccgacggggccaagcggcgggtgtgccacttctacgacgcggaggtggggaactactactgcgggcaggggcacccgatgaagccccaccgcatccggatgacccacgcgctgctcgcccactacggcctcctcgaccagatgcaggtgctcaagccccacccggcgcgcgaccgcgacctctgccgcttccacgccgacgactacgtcgccttcctccgctccgtcacgccggagacccagcaggaccagatccgggcgctcaagcgcttcaacgtcggcgaggactgccccgtcttcgacggcctctacagcttctgccagacctacgccgggggatccgtcggcggcgccgtcaagctcaaccacggccacgacatcgccatcaactgggccggcggcctccaccacgccaagaagtgcgaggcctccggcttctgctacgtcaacgacatcgtcctcgccatcctcgagctcctcaaataccaccagcgtgttctctatgtggacatcgatatccaccatggggatggtgtggaggaggcgttttacacgacggacagggtgatgacggtctcgttccacaagtttggggattatttcccgggaacaggggatatccgtgacattgggtattcagaggggaagtattactgcctgaatgtcccgctggatgatgggattgatgatgacagctaccagtccatcttcaagccgatcatcagcaaagtcatggagatgtatcgtcctggtgcagtcgtgcttcagtgcggcgctgattcgttgtccggcgataggttgggctgtttcaatctctcagggaaaggtcatgcagaatgtgtaaagttcatgaggtctttcaatgttccgttgcttcttcttggtggtggtggatatgccataagaaatgttgcacgctgttggtgctatgagacaggagttgcacttggtcatgagctcaccgacaagatgcctccaaatgagtattttgagtattttggtccagaatacagtcttttcgttgcagcaagtaacatggagaacagaaataccaacaagcaattggaggaaataaaatgcaacattctggacaatctttcaaaacttcaacatgctcctagtgtccaatttgaagagcgaattcctgaaacaaagttacctgagccagatgaagatcaagaggatccagatgaaaggcacgaccctgactctgatatggtattggatgatcacaaacctatgggacactcagcaagaagccttattcgcaacatcgaagttaagagagaaatcactgaatcagaggccaaagatcagcatggtaagagattgacaactgaacataaaggaccagaaccgatggcagacgatcctggttcctccaagcaagctcctgtaagtcgtcgtcttctctatccatctgcaaatccatag

SEQ ID NO: 298 - protein, 493 aa, Oryza sativa
MDASAGGGGNSLPTAGADGAKRRVCHFYDAEVGNYYCGQGHPMKPHRIRMTHALLAHYGLLDQMQVLKPHPARDRDLCRFHADDYVAFLRSVTPETQQDQIRALKRFNVGEDCPVFDGLYSFCQTYAGGSVGGAVKLNHGHDIAINWAGGLHHAKKCEASGFCYVNDIVLAILELLKYHQRVLYVDIDIHHGDGVEEAFYTTDRVMTVSFHKFGDYFPGTGDIRDIGYSEGKYYCLNVPLDDGIDDDSYQSIFKPIISKVMEMYRPGAVVLQCGADSLSGDRLGCFNLSGKGHAECVKFMRSFNVPLLLLGGGGYAIRNVARCWCYETGVALGHELTDKMPPNEYFEYFGPEYSLFVAASNMENRNTNKQLEEIKCNILDNLSKLQHAPSVQFEERIPETKLPEPDEDQEDPDERHDPDSDMVLDDHKPMGHSARSLIRNIEVKREITESEAKDQHGKRLTTEHKGPEPMADDPGSSKQAPVSRRLLYPSANP

SEQ ID NO: 299 - DNA, 1275 bp, Oryza sativa
  CDS (1)..(1275)
atggcgatccgcgcgaggtcctcctcctacgccgccgcggcggtcgcgctggcgctcgcgctggcgtccgtcgccgctgtcgccggcgaggtcttcttccaggagaagttcgaagatggatgggaaagtcggtgggtcaagtcagaatggaagaaggatgagaacatggctggtgaatggaaccacacatctgggaagtggaatggagatcctgaggacaaaggtatccaaacctctgaggactacaggttctacgctatttcagcggagtacccagaattcagcaacaaggataaaaccctggtgctgcagttctctgtaaagcatgagcaaaagcttgactgtggtggtggatatgtcaagttgcttggtggtgatgttgaccagaagaaatttggtggggacacaccgtacagcattatgtttggaccagacatctgtgggtacagcaccaagaaggtccatactatctttactaagaatgacaagaaccatttgatcaagaaggatgtcccctgcgagactgatcagctgtcccatgtgtacactttgatcatccatcctgatgctacatacagcatacttattgacaatgttgagaagcaatctggcagcatctacgagcactgggatattctgcctccgaagcaaatcaaggacccagaagctaagaagccagaggactgggatgacaaggagtacattcctgaccctgaggacaagaagcctgagggatacgatgatattcccaaggaaatccctgaccctgatgctaagaagcctgaggctggggctgatgaggaagatggtgagtggactgcaccaaccatccgtaaccctgagtacaagggaccatggaagcaaaagaaaatcaagaaccctaactaccagggcaaatggaagccgccgatgatcgccaccccagacttccaagatgatccttacatctacgcctttgacagcctgaagtccattggaattgagttgtggcaggtcaaatcagggactctgtttgacaacattctgattactgacgatgctgctttggccaagacattcgcagaggagacatgggccaagcacaaggatgctgagaaggctgcttttgacgaggcagagaaaaagaaggaagaggaggaagctgccaaggccggtgaggacgatgatgatttggatgacgaggatgctgaggatgaggacaaggccgatgagaaggctgactctgatgcagaggatggcaaggattctgatgatgagaagcatgatgagctctaa

SEQ ID NO: 300 - protein, 424 aa, Oryza sativa
MAIRARSSSYAAAAVALALALASVAAVAGEVFFQEKFEDGWESRWVKSEWKKDENMAGEWNHTSGKWNGDPEDKGIQTSEDYRFYAISAEYPEFSNKDKTLVLQFSVKHEQKLDCGGGYVKLLGGDVDQKKFGGDTPYSIMFGPDICGYSTKKVHTIFTKNDKNHLIKKDVPCETDQLSHVYTLIIHPDATYSILIDNVEKQSGSIYEHWDILPPKQIKDPEAKKPEDWDDKEYIPDPEDKKPEGYDDIPKEIPDPDAKKPEAGADEEDGEWTAPTIRNPEYKGPWKQKKIKNPNYQGKWKPPMIATPDFQDDPYIYAFDSLKSIGIELWQVKSGTLFDNILITDDAALAKTFAEETWAKHKDAEKAAFDEAEKKKEEEEAAKAGEDDDDLDDEDAEDEDKADEKADSDAEDGKDSDDEKHDEL

SEQ ID NO: 301 - DNA, 279 bp, Oryza sativa
  CDS (1)..(279)
atggccggcatcatccacaagatcgaggagaagctccacatgggcggaggcgagcacaagaaggaagacgagcacaagaaggagggggagcaccacaagaaggacggggagcacaaggaaggcgtggtggagaagatcaaggacaagatcaccggcgaccacggcgacggcggcgagcacaaggagaagaaggacaagaagaagaagaaggagaagaagcacggcgaggagggctaccaccacgacggccacagcagcagcagcagcgacagcgactga

SEQ ID NO: 302 - protein, 92 aa, Oryza sativa
MAGIIHKIEEKLHMGGGEHKKEDEHKKEGEHHKKDGEHKEGVVEKIKDKITGDHGDGGEHKEKKDKKKKKEKKHGEEGYHHDGHSSSSSDSD

SEQ ID NO: 303 - DNA, 3321 bp, Oryza sativa
  CDS (1)..(3321)
  misc_feature (2)..(2): Xaa at amino acid position 2 stands for Arg, or Lys.
  misc_feature (3)..(3): r is a or g
  misc_feature (5)..(5): r is a or g
  misc_feature (6)..(6): Xaa at amino acid position 6 stands for Asp, or Tyr.
  misc_feature (16)..(16): k is g or t
garargggtggaggtkacgcggaggtggattcggcggctgctgctactggtgctcgggccacggcggcgacgacaccacggaggcagtctccggcgggagctgggagcccctcgcagcgcgacgcgcggtggggtgacacgagctcctacggtgctagaaagaagcacagggttttttgccagcttccaaatagtgattgggccttatgcactgtaattacaacctccggtgacgattccgtactaaagcttcctgaaggaaaagtactgaggttgaaaacagagagccttgaagctgcaaatcctgaaattcttgacggggtggatgatcttatgcagctaagttatctaagtgagccatccgttctgtacaatttgcagtacagatactctcaagacttgatatatactaaagcaggtccagttttggtggcggtcaatccttttaagaaagttcctctatatggtaatgagtacattgatgcatatagaaataaaacaaaggatagcccacacgtttatgcaatagcagattcagccctccgtgaaatgaaaagagatgaagttaaccagtctatcatcataagtggtgagagtggagcaggaaagacagaaactgcaaagattgctatgcagtatttggcttctcttggaggtgggggtggcatagaatatgagatcctacaaaccaacccaatactcgaggcttttggcaacgcaaagacactaagaaatgacaactcaagtcgctttggaaagctcattgaaattcattttagtacaactggaaggatttgtggtgccatgattcaaacatttctacttgagaagtcaagggttgtacaatgtgcagttggcgagcgctcctaccatattttttatcaactatgtgccggtgctcctgcgtccctcagagataagttgaatatgaagaaagcggatgaatacaaatatttgaagcagagttgctgctattcaattgccggtgtggatgatgctcaaatgttccgtactgtaacggaagctatgaacatcgttcatatcagcaaagaggaccaagataatgttttcacgatggtttctgcaattctatggctaggagatgtctctttcacggtcattgacaacgaaaaccatgttgagattgttgtagatgaagcggcagaaacggtcgcaagacttcttggctgcagtattgaagatctcaatttagctttgtcgaagaggcacatgaaagttaataatgaaaatattgtacagaaactcaccctttcacaggcaatcgacacaagagatgcgttggccaagtcactctatgccagtttgtttgagtggcttgttgaacaaattaacaagtctctttcagttggcaagcgtcgaactgggagatcaatcagcattcttgatatctatggctttgaatcattcgataggaacagttttgaacagttctgtattaactatgctaatgaaaggctccaacaacatttcaatcgccatttgtttaagcttgaacaagaggaatacgttgaagatggcattgactgggcaaaggttgagtttgaggacaatcagaactgtttgaatctctttgagaaaaagccactggggttgttgtctctgctagatgaagaatctaccttccccaatgccacagatcttacttttgcgaacaagcttaagcaacatctgaacaataattcttgcttccgaggagaaagaggcaaggcttttgcagtccgtcactatgcaggagaggtggcttatgacacgtcaggttttctagagaagaatagagatttattgcacatggactcaattcagttccttgccaaatgcaaatcctcactaccacaaatgtttgcatccaaaatgctttctcaatctgataatccgttacctgttccatatagaaatagtgctgctgactcacagaagttaagtgttgcgatgaagtttaagggacaattgttccaacttatgcaaagactcgaaagtacaacaccacactttatacgttgtattaagccaaacaatttgcaactccctgcaatttatgaacaaggacttgtgcttcaacaactcaaatgttgtggggttcttgaggttgtccgaatttcaagatctggatatccaacaagaatgactcatcagaaatttgctcgacggtatggctttcttcttcttgaggatgtcgcatctcaagacccacttagtgtttcggttgcaattcttcaccagtttaacattttgcctgagatgtatcaagttgggtacacaaaattgttctttcgaactggccagattggcaaacttgaagacactcggaaccgtactctgcatggtattttaagggttcaaagctgtttcagagggcatcaagcccgtcgccatgcaagggaacgaataagaggagttttggctcttcaatcatttattcgaggtgagaatgcaagaaaaatgtattcgtctctggcaaggaaacacagggcagccattattttacagagaaatctaaaatgctggcttgcaagaagatatttcgttaacatacggaaggcttcagtagtaatacaatctggcattcgtggttgtcttgttcgaagatgtgctggcaatgttgatctattgaatgtgctaagagaattcgaatcaaagaaggaggcagagggtgaccaaattttgattaaggcatcattcctggctgagctacaaaggcgaatattaaaggccgaggcgacagtccgagaaaaggatgaagagaacgagatgcttcagcagcgacttcagcaatatgaaaaccgatggtcagaatacgagcagaaaatgaaagcgatggaggaaatgtggcagaagcaaatgcggtcattacaatcaagcctatccgtagcaaagaagagccttgctcttgatgagacgcctaggatgtccgactcatcggtcgaccagagctgggagagcaatggggttcacattggcagcgcgtcgcagctggttccacgcaccgttggacgggagatgaatgccagcatcagcgtcatcagccgcttggccgaagagttcgagcagcgcagccaggtcttcgctgatgatgccaagttcttggttgaggtcaagtccggacaggccgatgccagcctgaaccctgacatggagctccgcaggctgaagcagaacttcgactcatggaagaaggacttcggctcgcgcataagggagacgaaggtgatcctcaacaagctggggagcggcaacgaatcgtcgcccaactcggtgaagcgaaaatggtgggggaggctgaacacatccaagttttcatga

SEQ ID NO: 304 - protein, 1106 aa, Oryza sativa
  misc_feature (2)..(2): The 'Xaa' at location 2 stands for Arg, or Lys.
  misc_feature (6)..(6): The 'Xaa' at location 6 stands for Asp, or Tyr.
EXGGGXAEVDSAAAATGARATAATTPRRQSPAGAGSPSQRDARWGDTSSYGARKKHRVFCQLPNSDWALCTVITTSGDDSVLKLPEGKVLRLKTESLEAANPEILDGVDDLMQLSYLSEPSVLYNLQYRYSQDLIYTKAGPVLVAVNPFKKVPLYGNEYIDAYRNKTKDSPHVYAIADSALREMKRDEVNQSIIISGESGAGKTETAKIAMQYLASLGGGGGIEYEILQTNPILEAFGNAKTLRNDNSSRFGKLIEIHFSTTGRICGAMIQTFLLEKSRVVQCAVGERSYHIFYQLCAGAPASLRDKLNMKKADEYKYLKQSCCYSIAGVDDAQMFRTVTEAMNIVHISKEDQDNVFTMVSAILWLGDVSFTVIDNENHVEIVVDEAAETVARLLGCSIEDLNLALSKRHMKVNNENIVQKLTLSQAIDTRDALAKSLYASLFEWLVEQINKSLSVGKRRTGRSISILDIYGFESFDRNSFEQFCINYANERLQQHFNRHLFKLEQEEYVEDGIDWAKVEFEDNQNCLNLFEKKPLGLLSLLDEESTFPNATDLTFANKLKQHLNNNSCFRGERGKAFAVRHYAGEVAYDTSGFLEKNRDLLHMDSIQFLAKCKSSLPQMFASKMLSQSDNPLPVPYRNSAADSQKLSVAMKFKGQLFQLMQRLESTTPHFIRCIKPNNLQLPAIYEQGLVLQQLKCCGVLEVVRISRSGYPTRMTHQKFARRYGFLLLEDVASQDPLSVSVAILHQFNILPEMYQVGYTKLFFRTGQIGKLEDTRNRTLHGILRVQSCFRGHQARRHARERIRGVLALQSFIRGENARKMYSSLARKHRAAIILQRNLKCWLARRYFVNIRKASVVIQSGIRGCLVRRCAGNVDLLNVLREFESKKEAEGDQILIKASFLAELQRRILKAEATVREKDEENEMLQQRLQQYENRWSEYEQKMKAMEEMWQKQMRSLQSSLSVAKKSLALDETPRMSDSSVDQSWESNGVHIGSASQLVPRTVGREMNASISVISRLAEEFEQRSQVFADDAKFLVEVKSGQADASLNPDMELRRLKQNFDSWKKDFGSRIRETKVILNKLGSGNESSPNSVKRKWWGRLNTSKFS

SEQ ID NO: 305 - DNA, 495 bp, Oryza sativa
  CDS (1)..(495)
atggagaactaccaggggcagcacggctacggcgccgaccgcgtcgacgtgtacggcaacccggtcggcgccggccagtacggcggcggcgccaccgcgcccggcggaggccacggagcgatggggatgggaggtcatgccggcgccggcgccggcggccagttccagccggcgagggaggaccgcaagaccggcggcatcctccaccgctccggcagctcaagctccagctcgtcgtctgaggacgacgggatgggagggaggaggaagaaggggatcaaggagaagatcaaggagaagctgcccggcggcaacaagggcaacaaccagcagcagcagcagatgatggggaacactggcggcgcgtacgggcagcagggccacgccgggatgaccggcgccggcaccggcgtgcacggtgcggagtacggcaacgccggcgagaagaagggattcatggacaagatcaaggagaagctgcccggccagcactaa

SEQ ID NO: 306 - protein, 164 aa, Oryza sativa
MENYQGQHGYGADRVDVYGNPVGAGQYGGGATAPGGGHGAMGMGGHAGAGAGGQFQPAREDRKTGGILHRSGSSSSSSSSEDDGMGGRRKKGIKEKIKEKLPGGNKGNNQQQQQMMGNTGGAYGQQGHAGMTGAGTGVHGAEYGNAGEKKGFMDKIKEKLPGQH

SEQ ID NO: 307 - DNA, 1881 bp, Oryza sativa
  CDS (1)..(1881)
atggcgacggcggcggggatggggatcggggcggcgtgcctggtggcgccgcaggtgaggccggggaggaggttgcggctccagcgggtgcggaggcggtgcgtggcggagctgagcagggacggtgggtcggcgcagcgcccgctggcaccggcgccgctggtgaagcagccggtcctgccgaccttcctcgtgccgacgtcgacgccacccgcgcccacgcagtcgccggcgccggcgccgaccccgccgccgttgccggactccggcgtgggggagatcgagcccgatctagaaggtctcacagaagattccatcgacaaaacaatttttgtggctagtgagcaggagtctgagatcatggatgtgaaggagcaagctcaagctaaagtaacacgcagcgttgtctttgtaaccggtgaagcttctccttatgcaaagtcaggtggactaggagatgtttgtggttcactgccaattgctcttgctcttcgtggtcatcgtgtgatggttgtaatgccgagatacatgaacggggccttgaacaaaaattttgcaaacgcattttacactgagaagcacattaagattccatgctttggcggagaacatgaagttactttttttcacgagtatagggattctgttgattgggtgtttgttgatcatccctcatatcatagacctggaaatttgtatggagataattttggtgcttttggcgataatcagttcagatacacactcctgtgctatgcggcgtgtgaagccccattaattcttgaactgggaggatatatctatggacagaaatgcatgtttgttgtgaatgattggcatgccagtcttgtgccagtccttcttgctgcaaaatatagaccatatggtgtttacagggatgcccgcagtgttcttgtcatacataatctagcacatcagggtgtggagcctgccagtacatatcctgacctgggattgccacctgaatggtatggagcattagaatgggtgtttccagagtgggcaaggcggcatgcccttgacaagggtgaggcagtcaattttttaaaaggcgcagttgtgacagcagatcgaattgtgactgtcagccaggggtattcatgggaggtcacaactgctgaaggtgggcaaggcctcaatgagctcttaagctcccggaagagtgtattgaatggaattgtaaatggaattgacattaatgattggaacccatccacagacaagtttctcccttatcattattctgttgatgacctgtccggaaaggccaagtgtaaagctgaattgcagaaggagctgggtttacctataaggcccgatgtgcctctgattggctttattggaagattggactatcaaaaaggcattgatctaattaaacttgccattccagatctcatgcgggacaatattcaattcgtcatgcttggatctggtgacccaggttttgaaggatggatgagatccacagaatcagggtacagggataaatttcgtggatgggttggatttagtgttccagtttcccaccgaataactgcaggttgcgatatattgttgatgccatccagattcgaaccttgtggcctcaatcagctatatgctatgcaatatggtacagtgcctgttgttcatggaactggaggcctcagagatacagtggagaattttaacccgtttgctgagaaaggagagcagggtacagggtgggcattctcgccactaaccattgaaaaaaatgctgtgggcattgcggatggcaatttcgacatacagggaacacaagtcctcttgggagggtctaatgaagcgaggcatgtcaagcgactttacatgggaccatgccgcctcacagtatga

SEQ ID NO: 308 - protein, 626 aa, Oryza sativa
MATAAGMGIGAACLVAPQVRPGRRLRLQRVRRRCVAELSRDGGSAQRPLAPAPLVKQPVLPTFLVPTSTPPAPTQSPAPAPTPPPLPDSGVGEIEPDLEGLTEDSIDKTIFVASEQESEIMDVKEQAQAKVTRSVVFVTGEASPYAKSGGLGDVCGSLPIALALRGHRVMVVMPRYMNGALNKNFANAFYTEKHIKIPCFGGEHEVTFFHEYRDSVDWVFVDHPSYHRPGNLYGDNFGAFGDNQFRYTLLCYAACEAPLILELGGYIYGQKCMFVVNDWHASLVPVLLAAKYRPYGVYRDARSVLVIHNLAHQGVEPASTYPDLGLPPEWYGALEWVFPEWARRHALDKGEAVNFLKGAVVTADRIVTVSQGYSWEVTTAEGGQGLNELLSSRKSVLNGIVNGIDINDWNPSTDKFLPYHYSVDDLSGKAKCKAELQKELGLPIRPDVPLIGFIGRLDYQKGIDLIKLAIPDLMRDNIQFVMLGSGDPGFEGWMRSTESGYRDKFRGWVGFSVPVSHRITAGCDILLMPSRFEPCGLNQLYAMQYGTVPVVHGTGGLRDTVENFNPFAEKGEQGTGWAFSPLTIEKNAVGIADGNFDIQGTQVLLGGSNEARHVKRLYMGPCRLTV

SEQ ID NO: 309 - DNA, 1104 bp, Oryza sativa
  CDS (1)..(1104)
atggcaaccgccgccgcgtcggatctggagagcaaggccaaggcggccttcgtcgacgacgacttcgagctcgccgccgagctctacacgcaggcaatcgaggccagccccgccaccgccgagctctacgccgaccgcgcccaggcccatatcaagctaggcaactacactgaggctgtagctgatgctaacaaggccattgaacttgacccatcaatgcacaaggcttatcttcgtaaaggcgctgcatgtatacgactggaggagtatcaaactgcaaaagcagctcttgaattgggttactcgttcgcatctggtgactcaaggtttactcgcctaatgaaggagtgtgatgagcgcattgctgaggagcttactgaagtccctgttaagaaggctgaagatggagcagctgccccctctgttgcttcttttgttgaggaaaaggatgatgctgcaaacatggataatacaccaccaatggtagaagtgaagccaaaatacaggcacgacttctacaacagtgctacagaagttgtattgacaatttttgcaaagggtgttcctgctgagaatgttgttgttgattttggtgaacaaatgttaagtgtgtcgattgaagtccctggagaggagccgtaccattttcagcctcgtctgttttctaagatcatccctgagaaaagcagataccaagtgctatccacgaaggttgaaataagactggctaaagctgaacagattacatggacctcacttgattatgataaaaaaccaaaggctgttccacaaaagataatccctccagctgaatcggcccagaggccatcatatccttcctcaaaatccaagaaagactgggataaactggaagctgaagttaaaaaggaggagaaggaggagaagcttgaaggcgatgctgcattgaacaaatttttccgtgacatctacagtgatgctgatgaagacatgcgacgagcaatgatgaaatcttttgttgaatctaacggtactgttctgtcgaccaattggaaagatgttggctcgaagaaggtagagggaagcccacctgatgggatggagcttaagaaatgggagtactaa

SEQ ID NO: 310 - protein, 367 aa, Oryza sativa
MATAAASDLESKAKAAFVDDDFELAAELYTQAIEASPATAELYADRAQAHIKLGNYTEAVADANKAIELDPSMHKAYLRKGAACIRLEEYQTAKAALELGYSFASGDSRFTRLMKECDERIAEELTEVPVKKAEDGAAAPSVASFVEEKDDAANMDNTPPMVEVKPKYRHDFYNSATEVVLTIFAKGVPAENVVVDFGEQMLSVSIEVPGEEPYHFQPRLFSKIIPEKSRYQVLSTKVEIRLAKAEQITWTSLDYDKKPKAVPQKIIPPAESAQRPSYPSSKSKKDWDKLEAEVKKEEKEEKLEGDAALNKFFRDIYSDADEDMRRAMMKSFVESNGTVLSTNWKDVGSKKVEGSPPDGMELKKWEY

SEQ ID NO: 311 - DNA, 435 bp, Oryza sativa
  CDS (1)..(435)
atggtgcaggggacgctcgaggtgctgctcgtcggagccaagggcctcgagaacaccgactacctgtgcaacatggacccgtacgcggttctcaaatgccgctcgcaggagcagaagagcagcgttgcgtcaggtaaaggatctgaccctgaatggaacgaaacctttatgttcagcgtcactcacaacgctacagagctcatcatcaagttgatggacagtgacagtggcacggatgatgattttgttggagaagcaacgatttctttggaagcaatctatacagaaggaagcatacccccaactgtttataatgttgtgaaagaagaagaataccgtggagaaatcaaagtgggcctgacgttcactccagaggatgatcgcgatcggggtttatctgaggaagacattggtggatggaagcagtcatcttga

SEQ ID NO: 312 - protein, 144 aa, Oryza sativa
MVQGTLEVLLVGAKGLENTDYLCNMDPYAVLKCRSQEQKSSVASGKGSDPEWNETFMFSVTHNATELIIKLMDSDSGTDDDFVGEATISLEAIYTEGSIPPTVYNVVKEEEYRGEIKVGLTFTPEDDRDRGLSEEDIGGWKQSS

SEQ ID NO: 313 - DNA, 609 bp, Oryza sativa
  CDS (1)..(609)
atgaatcccgagtatgactacctcttcaagcttctgctcatcggagactcgggcgtcgggaagtcttgcctgcttctgaggtttgcggacgattcatatctggagagctatatcagtaccatcggcgttgattttaaaatccgcactgttgagcaagatgggaagacaataaagctgcaaatttgggatactgctggccaagagcgatttaggaccattacaagcagctactaccgtggtgcccacgggatcattgttgtttatgatgtgactgatcaggagagcttcaacaatgtcaagcagtggctgaatgaaattgataggtatgctagtgaaaatgtgaacaagctcttggtggggaacaagtgtgatctagctgagaacagagtggtttcttatgaggctggcaaggcccttgctgatgagattggaataccattcctggagaccagtgcgaaggatgcaacaaatgtggagaaggcattcatgaccatggcaggagagataaagaacaggatggcaagccaaggccgtacaaatgcaagcaagcctgcaaccgtgcaaatgccgaggcaacctgttgcccagcaaagcagctgctgctcttga

SEQ ID NO: 314 - protein, 202 aa, Oryza sativa
MNPEYDYLFKLLLIGDSGVGKSCLLLRFADDSYLESYISTIGVDFKIRTVEQDGKTIKLQIWDTAGQERFRTITSSYYRGAHGIIVVYDVTDQESFNNVKQWLNEIDRYASENVNKLLVGNKCDLAENRVVSYEAGKALADEIGIPFLETSAKDATNVEKAFMTMAGEIKNRMASQGRTNASKPATVQMPRQPVAQQSSCCS

SEQ ID NO: 315 - DNA, 1410 bp, Oryza sativa
  CDS (1)..(1410)
atgcatatgatgcggcggctcaagagcatcgcctccggccgctcgtccgtctccgatccgggtggtgattctggcaccaaaagaccaaaattcgatcaggatggagcaggagatatagtcattgagccacatctaactgatgacaaacctatgcgcgtagaccaagaatcatcttcatctcatagagatgctgaggcaagcacatctactagtaagaatcctggtagaactgaagaagcaggtgcggatattcttccaaaagaaatgaatgagatgacaataagtgatgataaagttgatggccataatgataaggaatctgaaggtgttattgttaatgcaaatggaacagaaacaggtcagattattgtgacatcaattggaggtcaaaatgggaagccaaagcagaaggtatcatacatggcagaacgtgtagttggtactggttcatttggtgtagtttttcaggccaagtgcttggaaactggagagactgttgccattaagaaggttctgcaagataaaagatataagaacagagagctccaaacaatgcaactgcttgaccatcctaatgtggtccagctaaagcatcacttcttttcgacgactgagaggggtgaagtttacctcaaccttgtacttgaatatgtctcagagacagtttatcgtgttgctaaatactacaatcggatgaaccagcgtgtgcccatattgcatgttaagctgtatgcatatcagatgtgccgtgcccttgcatatatccatcgtgttgttggtgtctgccatcgagatattaaacctcaaaatctactggtcaatcctcatacacatcaactgaagctttgtgattttggaagtgctaagaaattggttcctggtgaacctaacatatcatacatttgctcgcggtattatagggctcctgaactaatatttggagctacagagtataccacagcaattgatatctggtctgttggttgtgtactagctgagcttctgattggtcagcctctgttccctggagaaagtggtgttgatcaactggtggaaataataaagattttgggtacaccaactagagaagaaatcaggtgcatgaatccaaactattctgaattcaaattccctcagataaaagctcatccatggcacaagctttttggtaagcgcatgccacctgaagctgttgatcttgtgtcaaggttgctgcagtactcgccaaatttgcgttgcacagctgttgatgcttgtgctcatccattctttgatgaactgcgggatcccaagacctgcttgtcaaatggacgatcattaccacccttgttcgacttctcagctgctgaattggaaggccttcctgttgagctagtccaccgaatcattcctgaacatatgaggaagtga

SEQ ID NO: 316 - protein, 469 aa, Oryza sativa
MHMMRRLKSIASGRSSVSDPGGDSGTKRPKFDQDGAGDIVIEPHLTDDKPMRVDQESSSSHRDAEASTSTSKNPGRTEEAGADILPKEMNEMTISDDKVDGHNDKESEGVIVNANGTETGQIIVTSIGGQNGKPKQKVSYMAERVVGTGSFGVVFQAKCLETGETVAIKKVLQDKRYKNRELQTMQLLDHPNVVQLKHHFFSTTERGEVYLNLVLEYVSETVYRVAKYYNRMNQRVPILHVKLYAYQMCRALAYIHRVVGVCHRDIKPQNLLVNPHTHQLKLCDFGSAKKLVPGEPNISYICSRYYRAPELIFGATEYTTAIDIWSVGCVLAELLIGQPLFPGESGVDQLVEIIKILGTPTREEIRCMNPNYSEFKFPQIKAHPWHKLFGKRMPPEAVDLVSRLLQYSPNLRCTAVDACAHPFFDELRDPKTCLSNGRSLPPLFDFSAAELEGLPVELVHRIIPEHMRK

SEQ ID NO: 317 - DNA, 861 bp, Oryza sativa
  CDS (1)..(861)
atggtgaacggctacttgttccgggagtacatcggcgcgcagttcaccggcgtgcgcttctccgacgtgcccgtcaacccgggcctcagcttccacttcatcctcgccttcgccatcgactacttcatggcgacgcagtcctccaagccggcgccagccaacggcgtgttcgccccgtactgggacacggccaacctgtccccggccgccgtcgccgcggccaaggcggcgcaccccaacctcagcgtcatcctcgccctcggcggcgacaccgtccagaacaccggcgtcaacgccacgttcgcgccgacgtcgtccgtcgacgcgtgggtgcgcaacgccgccgactccgtctccggcctcatcgacgcctacggcctcgacggcgtcgacgtcgactacgagcacttcgccgccggcgtggacacgttcgtggagtgcatcggtcgcctcctcaccgagctcaaggcgcggcacccgaacatcgccacctccatcgcgccgttcgagcaccccgtggtgcagcgctactaccagccgctgtggcggcgctacgccggcgtgatcgactacgtcaacttccagttctacggctacggcgccaacaccgacgtggcgacgtacgtgatgttctacgacgagcaggcggcgaactaccccggcagcaagctgctcgccagcttcaagaccgggaacgtcaccgggctgctctcgccggagcaggggatcgccggcgcgaaggagttgcagcggcaggggaagctgccggggttgttcatctggtcagcggatagctccatggtcagcagctacaagtttgagtacgagaccaaggctcaggagatcgtcgccaaccactga

SEQ ID NO: 318 - protein, 286 aa, Oryza sativa
MVNGYLFREYIGAQFTGVRFSDVPVNPGLSFHFILAFAIDYFMATQSSKPAPANGVFAPYWDTANLSPAAVAAAKAAHPNLSVILALGGDTVQNTGVNATFAPTSSVDAWVRNAADSVSGLIDAYGLDGVDVDYEHFAAGVDTFVECIGRLLTELKARHPNIATSIAPFEHPVVQRYYQPLWRRYAGVIDYVNFQFYGYGANTDVATYVMFYDEQAANYPGSKLLASFKTGNVTGLLSPEQGIAGAKELQRQGKLPGLFIWSADSSMVSSYKFEYETKAQEIVANH

SEQ ID NO: 319 - DNA, 1476 bp, Oryza sativa
  CDS (1)..(1476)
atggatccttgcaagttccggccgtcgagctcgttcgacacgaagacgacgacgacgaacgcgggagctccggtgtggaacgacaacgaggcgctgacagtggggcccagggggccgatcctcctcgaggactaccacctgatcgagaaggtggcgcacttcgcccgggagcgcatcccggagcgcgtggtccacgcccgcggcgcctccgccaagggcttcttcgagtgcacccacgacgtcaccgacatcacctgcgccgacttcctccggtccccgggcgcccagacccccgtcatcgtccgcttctccaccgtcatccacgagcgcggcagcccggagacgatccgcgacccgcgcgggttcgccgtcaagttctacacccgcgagggcaactgggacctcctcggcaacaacttccccgtcttcttcatccgcgacggcatcaagttccccgacgtcatccacgccttcaagcccaacccgcgctcccatgtccaggagtactggagggtcttcgacttcttgtcccaccaccccgagagcctccacaccttcttcttcctcttcgacgacgtcggcatccccaccgattaccgccacatggacggcttcggcgtcaacacctacaccttcgtcacccgcgacgccaaggccaggtacgtcaagttccactggaagcccacctgcggcgtcagctgcttgatggacgacgaggccacgctcgtcggcggcaagaaccacagccacgccacccaggacctctacgactccatcgccgccggcaacttccccgagtggaagctgttcgtccaggtgatcgacccggaggaggaggagaggttcgacttcgacccgctggatgacaccaagacatggccggaggacgaggtgccgctccggcccgtggggcgcctcgttctcaaccgcaacgtcgacaacttcttcaacgagaacgagcagctggcgttcgggccggggctggtggtgccggggatctactactccgacgacaagatgctgcagtgcagggtgttcgcgtacgccgacacgcagcgctacaggctggggccaaactacctgatgctgccggtgaacgcgcccaagtgcgcccaccacaacaaccactacgacggcgccatgaacttcatgcaccgggacgaggaggtggactactacccatcgcgccacgcgccgctccgccacgcgccgccgacgcccatcacgccgcgccccgtggtggggaggaggcagaaggcgacgatacacaagcagaacgacttcaagcagcccggggagaggtacaggtcgtgggcgccggatagacaggagaggttcatcccccttcgccggcgagtcgcgcaccccaaggtctcccctgagctccgcgccatctgggtcaactacctctcccagtgtgatgagtcgttgggggtgaagattgcgaataggctcaacgtgaagccaagcatgtga

SEQ ID NO: 320 - protein, 491 aa, Oryza sativa
MDPCKFRPSSSFDTKTTTTNAGAPVWNDNEALTVGPRGPILLEDYHLIEKVAHFARERIPERVVHARGASAKGFFECTHDVTDITCADFLRSPGAQTPVIVRFSTVIHERGSPETIRDPRGFAVKFYTREGNWDLLGNNFPVFFIRDGIKFPDVIHAFKPNPRSHVQEYWRVFDFLSHHPESLHTFFFLFDDVGIPTDYRHMDGFGVNTYTFVTRDAKARYVKFHWKPTCGVSCLMDDEATLVGGKNHSHATQDLYDSIAAGNFPEWKLFVQVIDPEEEERFDFDPLDDTKTWPEDEVPLRPVGRLVLNRNVDNFFNENEQLAFGPGLVVPGIYYSDDKMLQCRVFAYADTQRYRLGPNYLMLPVNAPKCAHHNNHYDGAMNFMHRDEEVDYYPSRHAPLRHAPPTPITPRPVVGRRQKATIHKQNDFKQPGERYRSWAPDRQERFIPLRRRVAHPKVSPELRAIWVNYLSQCDESLGVKIANRLNVKPSM

SEQ ID NO: 321 - DNA, 1749 bp, Oryza sativa
  CDS (1)..(1749)
atggcggcgaacgcggggatggtggcgggatcccgcaaccggaacgagttcgtcatgatccgccccgacggcgacgcgccaccgccggctaagccagggaagagtgtgaatggtcaggtctgccagatttgtggcgacactgttggcgtctcggccaccggcgacgtctttgttgcctgcaatgagtgcgccttcccggtctgccgcccttgctacgagtacgagcgcaaggaagggaaccagtgctgcccccagtgcaagactagatacaagaggcacaaaggtagccctagagttcagggcgatgaggaggaggaagatgttgatgacctggacaatgaattcaattataagcatggcaatggcaaaggtccagagtggcagatacagagacagggggaagatgttgacctgtcttcatcttctcgccacgaacaacatcggattccccgtctgacaagtgggcaacagatctcaggagagatccctgatgcttcccccgatcgccattctatccgcagcggaacatcaagctatgttgatccaagtgttccagttcctgtgaggattgtggacccctccaaggacttgaattcctatgggattaacagtgttgactggcaagaaagagttgccagctggaggaacaagcaggacaaaaatatgatgcaggtagctaataaatatccagaggcaagagggggagacatggaagggactggttcaaatggtgaagatatccaaatggttgatgatgcacgtctacctctgagccgcatagtgcctatcccttcaaaccagctcaacctttaccggattgttatcattctccgtcttatcatcctgatgttcttcttccaatatcgtgtcactcatccagtgcgggatgcttatggattgtggctagtatctgttatctgtgaaatttggtttgccttatcctggctcctagatcaattcccaaagtggtacccgataaaccgtgaaacataccttgacaggcttgcattgagatatgatagggagggagagccatcacagcttgctcccattgatgtctttgtcagtacggtggatccactaaaggaacctcctctgatcacagcaaacactgttttgtccattctggctgtggattaccctgttgacaaagtgtcatgctatgtttctgacgatggttcagctatgttaacttttgaggctctgtcagaaactgcagaatttgctaggaagtgggttccgttttgcaagaagcacaatattgaaccacgagctccagagttttactttgctcaaaaaatagattacctgaaggacaaaatccaaccttcctttgttaaagaaaggcgggcaatgaagagagagtatgaagaattcaaggtacggatcaatgctcttgttgcgaaggcacaaaaagtacctgaagaggggtggaccatggctgatggcactgcttggcctgggaataacccaagggatcaccctggcatgattcaggtgttcttggggcacagtggtgggcttgacactgatggtaacgagttgccacggcttgtctacgtctctcgtgaaaagaggccaggattccagcatcacaagaaggctggtgcaatgaatgcattgattcgtgtatctgctgtgctgacaaatggtgcctatcttctcaatgtggattgtgatcattacttcaacaatagcaaagctcttagagaagcaatgtgcttcatgatggatcccgcactaggaaga

SEQ ID NO: 322 - protein, 583 aa, Oryza sativa
MAANAGMVAGSRNRNEFVMIRPDGDAPPPAKPGKSVNGQVCQICGDTVGVSATGDVFVACNECAFPVCRPCYEYERKEGNQCCPQCKTRYKRHKGSPRVQGDEEEEDVDDLDNEFNYKHGNGKGPEWQIQRQGEDVDLSSSSRHEQHRIPRLTSGQQISGEIPDASPDRHSIRSGTSSYVDPSVPVPVRIVDPSKDLNSYGINSVDWQERVASWRNKQDKNMMQVANKYPEARGGDMEGTGSNGEDIQMVDDARLPLSRIVPIPSNQLNLYRIVIILRLIILMFFFQYRVTHPVRDAYGLWLVSVICEIWFALSWLLDQFPKWYPINRETYLDRLALRYDREGEPSQLAPIDVFVSTVDPLKEPPLITANTVLSILAVDYPVDKVSCYVSDDGSAMLTFEALSETAEFARKWVPFCKKHNIEPRAPEFYFAQKIDYLKDKIQPSFVKERRAMKREYEEFKVRINALVAKAQKVPEEGWTMADGTAWPGNNPRDHPGMIQVFLGHSGGLDTDGNELPRLVYVSREKRPGFQHHKKAGAMNALIRVSAVLTNGAYLLNVDCDHYFNNSKALREAMCFMMDPALGR

SEQ ID NO: 323 - DNA, 438 bp, Oryza sativa
  CDS (1)..(438)
atgacgctggtgaagattggtccgtggggcggaaatggagggtcagctcaggacatcagtgtgccacccaagaagctgttaggcgtgacaatctacagctcagatgcaatcagatccattgccttcaactacatcggtgtggatggacaggaatatgccattggtccatggggtgggggcgaaagcacctctacagagattaaactgggctcctctgagcagatcaaggagatttctggaacccatggcccagtctatgatctggctgacattgtcacctatcttaagattgtgacaagtgctaataatacatacgaggctggagtcccaaatggaaaggaattcagcattccactgcaagactctggccatgtcgttggattctttggaaggtctggaacgcttatcgacgcaattggcatctacgtccacccttga

SEQ ID NO: 324 - protein, 145 aa, Oryza sativa
MTLVKIGPWGGNGGSAQDISVPPKKLLGVTIYSSDAIRSIAFNYIGVDGQEYAIGPWGGGESTSTEIKLGSSEQIKEISGTHGPVYDLADIVTYLKIVTSANNTYEAGVPNGKEFSIPLQDSGHVVGFFGRSGTLIDAIGIYVHP

SEQ ID NO: 325 - DNA, 873 bp, Oryza sativa
  CDS (1)..(873)
atggggaaggacgaggtgatggagagcggcggcgccgccggcgaattcgcggccaaggactacacggacccgccgccggcgccgctgatcgacgcggcggagctggggtcgtggtcgctgtaccgcgccgtcatcgccgagttcatcgccacgctgctgttcctgtacatcaccgtggccacggtgatcgggtacaagcaccagacggacgcgtcggcctccggcgccgacgcggcgtgcggcggcgtgggcgtgctcggcatctcgtgggcgttcggcggcatgatcttcatcctggtctactgcaccgccggcatctccggcgggcacatcaacccggcggtgacgttcgggctcttcctggcgcgcaaggtgtccctggtccgcgccatcctctacatcgtggcgcagtgcctcggcgccatctgcggcgtcgggctcgtcaatgcgttcccaaacgcctacttcaacaggtacgggggcggcgccaacaccctcgccgccggctactccaagggcaccggcctcgccgccgagatcatcggcaccttcgtgctcgtctacaccgtcttctccgccaccgaccccaagcgcaacgcccgcgactcacatgtcccggtcttggcgccgctgccaatcggcttcgccgtgttcatggtccacctggcgacgatcccgatcaccggcaccggcatcaacccggccaggagcatcggagcggccgtcatcttcaacaacgagaaggcgtggcacaaccattggatcttctgggtcggcccgttcgtcggcgccgccatcgcggcgttctaccaccagtacatcctccgggccggcgccatcaaggccctcggctccttcaggagcaacgcgtga

SEQ ID NO: 326 - protein, 290 aa, Oryza sativa
MGKDEVMESGGAAGEFAAKDYTDPPPAPLIDAAELGSWSLYRAVIAEFIATLLFLYITVATVIGYKHQTDASASGADAACGGVGVLGISWAFGGMIFILVYCTAGISGGHINPAVTFGLFLARKVSLVRAILYIVAQCLGAICGVGLVNAFPNAYFNRYGGGANTLAAGYSKGTGLAAEIIGTFVLVYTVFSATDPKRNARDSHVPVLAPLPIGFAVFMVHLATIPITGTGINPARSIGAAVIFNNEKAWHNHWIFWVGPFVGAAIAAFYHQYILRAGAIKALGSFRSNA

SEQ ID NO: 327 - DNA, 279 bp, Oryza sativa
  CDS (1)..(279)
tgcaaagtttcatatattgacgcaattcttgggacaaccgtcaaggttcccactgttgatgggatggttgacctaaagatcccctccggtacccagccaggcacaacgttagtgatgtccaagaaaggtgtcccactcctcgggaagtcaaatgctcgtggagaccagctagtgcgtgtacaggtcgagattccaaagcgtctgagcagcgacgagaggaagctgattgaagaacttgcaaacctaaacaaggctcaaacagcaaacagcaggagataa

SEQ ID NO: 328 - protein, 92 aa, Oryza sativa
CKVSYIDAILGTTVKVPTVDGMVDLKIPSGTQPGTTLVMSKKGVPLLGKSNARGDQLVRVQVEIPKRLSSDERKLIEELANLNKAQTANSRR

SEQ ID NO: 329 - DNA, 924 bp, Oryza sativa
  CDS (1)..(924)
atgagcagcccccatggcggcctcgacgaccagatcgagcgcctcatgcagtgcaagcccctccccgagcccgaggtcagagcactttgcgagaaggcaaaagagatattgatggaggagagcaacgttcaacctgtaaagagtcctgttacaatatgtggtgatattcatgggcagtttcatgaccttgcagaactgttccgaatcggtggaaagtgcccagatacaaactacttgtttatgggagattacgtggatcgtggttattattctgttgaaactgtcacgcttttggtggctttaaaggttcgttatcctcagcgaattactattctcagaggaaaccacgaaagtcgacagatcactcaagtttatggattctatgacgagtgcttaaggaagtacgggaatgcaaatgtgtggaaaacttttacagatctcttcgattacttccccttgacagcattggttgagtcagaaatattttgcctgcatggtggattatcgccatccattgagacacttgataacatacgtaacttcgatcgtgtccaagaagttccccatgaagggcccatgtgtgatcttctgtggtctgatccagacgatcgatgtggttggggtatttctcctcgaggtgctggatacaccttcgggcaggatatatcagagcagttcaaccataccaataatttaagacttattgctagagctcaccagttggtcatggagggattcaattgggctcatgagcaaaaagttgttaccatatttagtgcacctaattattgctatcgctgtgggaacatggcatcaatcttggaagttgatgattgcagggagcatacattcatccagtttgagccagccccaagaaggggagagccagatgtaactcgtagaacacctgactatttcctgtga

SEQ ID NO: 330 - protein, 307 aa, Oryza sativa
MSSPHGGLDDQIERLMQCKPLPEPEVRALCEKAKEILMEESNVQPVKSPVTICGDIHGQFHDLAELFRIGGKCPDTNYLFMGDYVDRGYYSVETVTLLVALKVRYPQRITILRGNHESRQITQVYGFYDECLRKYGNANVWKTFTDLFDYFPLTALVESEIFCLHGGLSPSIETLDNIRNFDRVQEVPHEGPMCDLLWSDPDDRCGWGISPRGAGYTFGQDISEQFNHTNNLRLIARAHQLVMEGFNWAHEQKVVTIFSAPNYCYRCGNMASILEVDDCREHTFIQFEPAPRRGEPDVTRRTPDYFL

SEQ ID NO: 331 - DNA, 675 bp, Oryza sativa
  CDS (1)..(675)
atggcaggtgctcctcgaggactagttctcctcggcgtttgtgccgtcttgatggcggtcgccgtcggcggagaggcggcgtcggtggtcgtcggcacggccaagtgcgccgactgcacccggaagaacatgaaagctgaggatgctttcaagaacctccaggtggcgattaagtgcaagaacggcaacggcgagtacgagagcaaggccactggaaagctcgacggcaccggtgccttcagcgtcccccttgacgccgacctccacagctccgactgcatcgctcagctccacagcgccaccaacgagccatgccccggccaggagccatccaagatcgtgccaatgtcggagggcacctttgctgccgtcgccggcaagacccactaccgatcggcgttgtgcgcgtccgtgaccatctgcggcccaatcaagaagaagatcatagaccacttccacaagaagccggtgccacccaagccggagccaaagccggagccacccaagcccaagcctgagccggagcacccattcctcgaccacatccacaagaaggagaagcacttcttcgaccacttccacaagaagcccgtgccacccaagcctgagcctaagcccgagcccaagccgcagcctgcgccagagtaccacaaccctagccctccggcgaattaa

SEQ ID NO: 332 - protein, 224 aa, Oryza sativa
MAGAPRGLVLLGVCAVLMAVAVGGEAASVVVGTAKCADCTRKNMKAEDAFKNLQVAIKCKNGNGEYESKATGKLDGTGAFSVPLDADLHSSDCIAQLHSATNEPCPGQEPSKIVPMSEGTFAAVAGKTHYRSALCASVTICGPIKKKIIDHFHKKPVPPKPEPKPEPPKPKPEPEHPFLDHIHKKEKHFFDHFHKKPVPPKPEPKPEPKPQPAPEYHNPSPPAN

SEQ ID NO: 333 - DNA, 1500 bp, Oryza sativa
  CDS (1)..(1500)
atggcgagttccgttttctctcggttttctatatacttttgtgttcttctattatgccatggttctatggcccagctatttaatcccagcacaaacccatggcatagtcctcggcaaggaagttttagggagtgtagatttgatagactacaagcatttgaaccacttcggaaagtgaggtcagaagctggggtgactgagtacttcgatgagaagaatgaattattccagtgcacgggtacttttgtgatccgacgtgtcattcagcctcaaggccttttggtacctcgatacacaaatattcctggcgtggtctacatcatccaagggagaggttctatgggtttaaccttccccggttgccctgcgacttaccagcaacaattccaacaattttcatctcaaggccaaagtcagagccaaaagtttagagatgagcaccaaaagattcatcaatttaggcaaggagacattgttgcactcccagctggtgttgcacattggttctacaatgatggtgatgcacctattgttgccgtatatgtttatgacgtaaacaacaacgccaatcagcttgaacctaggcaaaaggagttcctattagccggcaacaacaatcgggctcaacaacaacaagtatatggtagctcaattgagcaacactctgggcaaaacatattcagcggatttggtgttgagatgctaagtgaggctttaggcatcaacgcagtagcagcaaagaggctacagagccaaaatgatcaaagaggagagatcatacatgtgaagaatggccttcaattgttgaaaccgactttgacacaacagcaagaacaagcacaagcacaagatcaatatcaacaagttcaatacagtgaacgacagcaaacatcttctcgatggaacggattggaggagaacttttgcacgatcaaggtgagagtaaacattgaaaatcctagtcgtgctgattcatacaacccacgtgccggaaggataacaagtgtcaatagtcagaagttccccatccttaacctcatccaaatgagcgctaccagagtaaacctataccagaatgctattctctcgccgttctggaacgtcaatgctcatagtttggtctatatgattcaagggcgatctcgagttcaagtcgttagtaactttggaaagactgtgtttgatggtgtccttcgcccagcacaattattgatcattccgcaacattatgctgtcttgaagaaagcagagcgtgaaggatgccaatatatcgcaatcaagacaaacgctaacgccttcgtcagccaccttgcagggaaaaactcagtattccgtgccttgccagttgatgtagtcgctaatgcgtatcgcatctcaagggagcaagcccgaagcctcaagaacaacaggggagaagagcacggtgccttcactcctagatttcaacaacaatactacccaggattatcgaatgagtccgaaagcgagacctcagagtaa

SEQ ID NO: 334 - protein, 499 aa, Oryza sativa
MASSVFSRFSIYFCVLLLCHGSMAQLFNPSTNPWHSPRQGSFRECRFDRLQAFEPLRKVRSEAGVTEYFDEKNELFQCTGTFVIRRVIQPQGLLVPRYTNIPGVVYIIQGRGSMGLTFPGCPATYQQQFQQFSSQGQSQSQKFRDEHQKIHQFRQGDIVALPAGVAHWFYNDGDAPIVAVYVYDVNNNANQLEPRQKEFLLAGNNNRAQQQQVYGSSIEQHSGQNIFSGFGVEMLSEALGINAVAAKRLQSQNDQRGEIIHVKNGLQLLKPTLTQQQEQAQAQDQYQQVQYSERQQTSSRWNGLEENFCTIKVRVNIENPSRADSYNPRAGRITSVNSQKFPILNLIQMSATRVNLYQNAILSPFWNVNAHSLVYMIQGRSRVQVVSNFGKTVFDGVLRPAQLLIIPQHYAVLKKAEREGCQYIAIKTNANAFVSHLAGKNSVFRALPVDVVANAYRISREQARSLKNNRGEEHGAFTPRFQQQYYPGLSNESESETSE

SEQ ID NO: 335 - DNA, 1140 bp, Oryza sativa
  CDS (1)..(1140)
atggtcgaggtggaggaagtcagcaacaagatgcaggtgcagatgcgcctccaccccgccgcggcggcggaggaggaggacgccgacctcccgctccccgccctcttcgacaaggcgtcccacctccactccctcgcctccagctcctccctcgaccaggaagggatccgcaagggggtcgacctgctgcggcggtgcgacgagatggtcagtaaggtcggcctcttctcctccaacgagaccaaggatgacatctccaccgccaacctcaaatacctactcgtaccgtactaccttggggaaatgactgaaagggtagcgcaggaagatcggatcccagtccttaaggcgtcgcaggatcatttgaaggaattcatttctatctgtgaagcactggagcttatatcagaggatgagcttgaaatatctaggcagaagaacctgataccatggcaaatcgaagagcacagaaggttgcacggttcaagcgccaaaaggctgcagaaacaaagctctagaatcaaggagaggaaagaaaggcgtaggcgtcatgagagcagctgcttatcagctcctattgagctgggaggagatcttttgaggatgatggagaaggaaagagaaggcatggttagctactatctcattggctctatcgaaggctttgaccttcttgacatgttaaagaaggaagaagaaatcgttccggcagtaaaagaaggaaagcgaaggatggtaatgcatttgctcgtgaaatgcttgatgaacgtacaaaaagggctgaagcatggcaccataatgctgccaaccgtgcaccatactccaaaccagctgatccaatcacttgtgcaactaaccagtgaaagagagagaatggcagcacaagtttttcagccaagttataggttgccaacgatgagcatagaagaagctggcttacgtgagatgaaaatgatggagaaatggcaagaaagaactgccaagatgattcaagaatcaaactccgcatggcacaaggatggcagtcggtcagcccaagaggacgaggacgccgaagaggagaaagcgagaggatgggatgactggaaggacgataaccctcgtggtgcaggcaacaagaagctcactccctgtggctaa

SEQ ID NO: 336 - protein, 379 aa, Oryza sativa
MVEVEEVSNKMQVQMRLHPAAAAEEEDADLPLPALFDKASHLHSLASSSSLDQEGIRKGVDLLRRCDEMVSKVGLFSSNETKDDISTANLKYLLVPYYLGEMTERVAQEDRIPVLKASQDHLKEFISICEALELISEDELEISRQKNLIPWQIEEHRRLHGSSAKRLQKQSSRIKERKERRRRHESSCLSAPIELGGDLLRMMEKEREGMVSYYLIGSIEGFDLLDMLKKEEEIVPAVKEGKRRMVMHLLVKCLMNVQKGLKHGTIMLPTVHHTPNQLIQSLVQLTSERERMAAQVFQPSYRLPTMSIEEAGLREMKMMEKWQERTAKMIQESNSAWHKDGSRSAQEDEDAEEEKARGWDDWKDDNPRGAGNKKLTPCG

SEQ ID NO: 337 - DNA, 783 bp, Oryza sativa
  CDS (1)..(783)
atgtcgcctgctgaggcatcgcgtgaggagaatgtgtacatggcaaagcttgccgagcaggctgagcgttacgaggaaatggtcgaattcatggagaaggtggcaaagaccactgatgttggtgagctcaccgttgaggagcggaacctgctttctgtggcttacaagaacgtgattggtgctcggagggcatcgtggaggatcatctcttctattgagcagaaggaggagagccgtgggaatgaggcatatgttgcatcaattaaggagtaccgtagcaggattgaaactgagctcagcaagatctgtgatggtatccttaagcttctggattcccaccttgtcccatctgccactgctgcagagtccaaggtgttctacctgaaaatgaagggtgactaccacaggtaccttgctgagtttaagtcaggagctgagaggaaggaagcagctgagaacactcttgtggcatacaagtctgcccaggatattgcactcgctgacctgcctacaactcacccgataaggcttggacttgcactgaacttctcagtgttctactatgagatactgaactcaccagaccgtgcttgcaaccttgcaaagcaggcgttcgacgatgctattgctgaactggacactcttggcgaggagtcttacaaggacagcaccttgatcatgcaacttcttcgtgacaatctgactctctggacctctgacaatgcggaggatggtggtgacgagatcaaggaagcagcgaagcctgaaggagagggccactaa

SEQ ID NO: 338 - protein, 260 aa, Oryza sativa
MSPAEASREENVYMAKLAEQAERYEEMVEFMEKVAKTTDVGELTVEERNLLSVAYKNVIGARRASWRIISSIEQKEESRGNEAYVASIKEYRSRIETELSKICDGILKLLDSHLVPSATAAESKVFYLKMKGDYHRYLAEFKSGAERKEAAENTLVAYKSAQDIALADLPTTHPIRLGLALNFSVFYYEILNSPDRACNLAKQAFDDAIAELDTLGEESYKDSTLIMQLLRDNLTLWTSDNAEDGGDEIKEAAKPEGEGH

SEQ ID NO: 339 - DNA, 669 bp, Oryza sativa
  CDS (1)..(669)
atgggttctgaaggaccttctggtgttaccgttcacgttactggattcaagaagttccatggagtcgctgagaatccgacggagaagattgtgcgcaatcttgagtcatttatggaaaagagagggttgcctaaaggtttaacacttggaagttgcactgttcttgagactgctgggcagggtgggcttggtccgttgtatgaagtgtttgaatcagccatcgtagacaaagagtatgggttgaatgatcaggggcaagtgattctgctccattttggagtcaacagtggcacaacaaggtttgcccttgagaatcaagctattaatgaagctaccttccgttgccctgatgagctgggatggaaaccacagagggcccctattgtgtcatctgatggaagcatctcaaatttaagaaagaccactgtgcctgtgaatgaagtgaacaagtccctacaacagatgggcttcgatgtggcgccttcggatgacgctggtcgattcgtatgcaactatgtctattaccaatctcttaggttcgcagaacagcgcggtatcaagtctttgttcgtccatttccccctcttcacgacgattagtgaggaagttcagatgaacttcgtcgcaaccctcctcgaagttcttgcttcccagaactatgcacagtaa

SEQ ID NO: 340 - protein, 222 aa, Oryza sativa
MGSEGPSGVTVHVTGFKKFHGVAENPTEKIVRNLESFMEKRGLPKGLTLGSCTVLETAGQGGLGPLYEVFESAIVDKEYGLNDQGQVILLHFGVNSGTTRFALENQAINEATFRCPDELGWKPQRAPIVSSDGSISNLRKTTVPVNEVNKSLQQMGFDVAPSDDAGRFVCNYVYYQSLRFAEQRGIKSLFVHFPLFTTISEEVQMNFVATLLEVLASQNYAQ

SEQ ID NO: 341 - DNA, 3825 bp, Oryza sativa
  CDS (1)..(3825)
atggtgttcaaggggaggttcttctcgtcccggcacaagtcgtcggagtcgtcgagccccacggacgggagcaacagcccgcggacgcccacctccgcgccgcccgcggcggggtcgccggcggcggcgtcgtcgtcgtcgtcgtccagatccgacaagaagaagcccaaatcggagacccccaggaagcgcgacaagctcttcggcggctccgcgtccgggtccgccgcctccaagggcggcgcgggggcggcgcctgcgtcggcctcgtcgagcccgtcggcggacgggaggaaggccgccgcggcgcagcttcgggatgggggcgcgggcggggcgtcggcggcggcgctgtcgcccatcctggcgtcctcgctgggcctcaaccggattaagacgagatccgggcccctgccgcaggaggggcaccgcatcgctgccgcgctcgggagcagtaatctatcgcgtgggcaggcgcaggcggacccgtcggctgcatcggctggcggcggcggcggcggcgggaggaaggctggaagctcatgggcagattcgaccagtggcagccgggggaaagggaaagcggccgaacatccagcgcggggcgccacagcaacgagcctggaaggaaagagctctgcaaaagatgtgttgagttataaggagattggcgcccatgattttcattttgccgcatggtgtctagatgctaaacttggaaccaccggtgctaactgtgcatatgatccctgtgaaacaccaaaggaatcggaatctccacgctttaaggccatcatgcaggctaccagtgctccaaggaagagagtccctgcagatataaaaagtttttcgcatgagttgaactccaagggggtccgaccattccctttttggaagcctcggggcatttacaacttgaaggaggtgttaaaagttattcaggtgagatttgagaaagcaaaggaggaggtaaattcagatttggcagtatttgcaggagacttggttggtgtaatggaaaagtacgcagattctcatcctgagtggaaggaaactttggaagatttgctcatacttgcacgtagctgctgtgtaatgacaccgggggagttttggcttcaatgtgaaggcatagtgcaagatttagatgatcatcgtcaggagctcccaatgggtgtgctgaagaaactgtacactcggatgctttttatccttacgagatgtacaagattgcttcaatttcacaaagagagtggctttgcggaggatgaagttgttatggatcaacgtgataagatcatacaatctgctgataggcagatattggctcaaccaggtgatgacactacaaccagaggcagcaaaagtgatgtacgaaaatcgtacagtcaagagcaacataatttaaaatggaagagaagccaggagataaagcctgttaagtttctttcaccgcttgatacaacagatgttaaaaaggaggttgagtctccaaccagggagcgtatatcttcctggaaaccttttccatcacctgtcccaaaaccccctaaagaccctacccctattaaagaggaatcacctaataagaaaacagatacaccccctgcagttagtagccaggctgaattgaacagtccagtggaatctacatcacatcaatctcttcctcccaagcatcaacacaaaacttcatggggtcactggtctgaccagccaaatatttctgaagaaggttcaataatgtgtcgcatatgtgaagaatatgtccctactcattatgtagaaaatcactcagcaatatgtgcaagtgctgacagatgtgatcaaaaaggtgtaagcgttgatgaacgtctaattagagttgctgaagcacttgaaaagttggtagaatcttatacacaaaaagaccttccaaatgctgttggcagtccagatgttgcaaaagtatcaaattcaagcatcaatgaagaatctgatggcccctctccaaaactctctgattggtctagaagaggctcagctgatatgcttgactacctccaggaggctgatagcactatttcactggatgacataaaaaaccttccttccatgacatgtaagactcgttttgggccaaaatctgatcatggaatggctacatcttcagcaggaagtatgacccctagatctccactaacaactccaagatctaatcacatagacatgcttttagctggccgaagtgcaattaatgagagcgatgatcttcctcagattgttgaacttgctgatattgcgcggtgcattgcaactactcctctagatgaagaaagggcactctccctattggttacctgcatagaagatctgcaagaaattgtcaatcgtaggaagcatgaggctctcacggtgcagacatttggcacacgtatagaaaaactccaccgggagaagtacctactgctttgtgattcggttgatatggacaaagttgattcagcgagtactgtaatggatgaagaagatgatgttgtccgtagcttacgagctagtcctgttcacccagtcaaggatcgtacttcgattgatgacttcgaaatcattaaacctatcagccgtggagcatttggacgtgttttcttggccaagaaaagaactacaggagacctctttgctataaaggtattaaggaaggcagatatgattcggaaaaatgctgttgagagtatattggctgaacgtgatatcttgattacagtgaggaatccttttgtggttcgtttcttctattcttttacctcccgggaaaatttgtatctagtcatggagtacctgaatggaggggacctgtattctctactgagaaatttagggtgcttggatgaagatgttgctcgtatataccttgcagaagttgtgctagctttggaatatttgcactctatgcacatagttcatagagatcttaaacctgacaacttattgatagctcatgacgggcatataaagttgacagattttgggttgtccaaggttggtctgatcaacagcacggatgatctatctggtcctgctgttagcgggtcttcgttgtatggagatgatgaacctcagatgagcgaatttgaggaaatggatcaccgagcacggagacaaaagcgctctgctgtcggaactcctgattatttagcaccggaaatccttttggggacaggacatggtactagtgctgattggtggtctgtgggtgttatactttttgaattaattgttggaatacctccattcaacgcagaacacccccagacaattttcgacaacattctgaaccgcaaaataccttggccacatgtcccagaagagatgagttctgaagctcaggatctaattgacaaattattgacagaagaccctcaccaacggctaggtgcaaatggcgcctctgaggttaagcagcatcaattttttaaagacattagctgggatacccttgctaggcaaaaggctgcctttgtcccctcctcagatagtgcatttgacacgagctacttcaccagccgttattcttggaatccatcggacgaaaacatctatgaagcatacgaatttgaggattccagtgataatggaagccttagtggcagcagtagctgtgtgagcaatcaccaagatgatatgggggatgagtctagtggcttcactgagtttgaatctagctcaaatgtcaactattctttcagcaatttctcattcaagaatctatcacaacttgtctctatcaattacgatttgctcaccaaaggattgaaggatgatccaccaacgaaatctgagacgtag

SEQ ID NO: 342 - protein, 1274 aa, Oryza sativa
MVFKGRFFSSRHKSSESSSPTDGSNSPRTPTSAPPAAGSPAAASSSSSSRSDKKKPKSETPRKRDKLFGGSASGSAASKGGAGAAPASASSSPSADGRKAAAAQLRDGGAGGASAAALSPILASSLGLNRIKTRSGPLPQEGHRIAAALGSSNLSRGQAQADPSAASAGGGGGGGRKAGSSWADSTSGSRGKGKAAEHPARGATATSLEGKSSAKDVLSYKEIGAHDFHFAAWCLDAKLGTTGANCAYDPCETPKESESPRFKAIMQATSAPRKRVPADIKSFSHELNSKGVRPFPFWKPRGIYNLKEVLKVIQVRFEKAKEEVNSDLAVFAGDLVGVMEKYADSHPEWKETLEDLLILARSCCVMTPGEFWLQCEGIVQDLDDHRQELPMGVLKKLYTRMLFILTRCTRLLQFHKESGFAEDEVVMDQRDKIIQSADRQILAQPGDDTTTRGSKSDVRKSYSQEQHNLKWKRSQEIKPVKFLSPLDTTDVKKEVESPTRERISSWKPFPSPVPKPPKDPTPIKEESPNKKTDTPPAVSSQAELNSPVESTSHQSLPPKHQHKTSWGHWSDQPNISEEGSIMCRICEEYVPTHYVENHSAICASADRCDQKGVSVDERLIRVAEALEKLVESYTQKDLPNAVGSPDVAKVSNSSINEESDGPSPKLSDWSRRGSADMLDYLQEADSTISLDDIKNLPSMTCKTRFGPKSDHGMATSSAGSMTPRSPLTTPRSNHIDMLLAGRSAINESDDLPQIVELADIARCIATTPLDEERALSLLVTCIEDLQEIVNRRKHEALTVQTFGTRIEKLHREKYLLLCDSVDMDKVDSASTVMDEEDDVVRSLRASPVHPVKDRTSIDDFEIIKPISRGAFGRVFLAKKRTTGDLFAIKVLRKADMIRKNAVESILAERDILITVRNPFVVRFFYSFTSRENLYLVMEYLNGGDLYSLLRNLGCLDEDVARIYLAEVVLALEYLHSMHIVHRDLKPDNLLIAHDGHIKLTDFGLSKVGLINSTDDLSGPAVSGSSLYGDDEPQMSEFEEMDHRARRQKRSAVGTPDYLAPEILLGTGHGTSADWWSVGVILFELIVGIPPFNAEHPQTIFDNILNRKIPWPHVPEEMSSEAQDLIDKLLTEDPHQRLGANGASEVKQHQFFKDISWDTLARQKAAFVPSSDSAFDTSYFTSRYSWNPSDENIYEAYEFEDSSDNGSLSGSSSCVSNHQDDMGDESSGFTEFESSSNVNYSFSNFSFKNLSQLVSINYDLLTKGLKDDPPTKSET

SEQ ID NO: 343 - DNA, 4242 bp, Oryza sativa
  CDS (1)..(4242)
atgtatagtagtcccaaagcattactatatctcttccacctggccgtcctgtacagacggctgggcccaacatcacgtacaccacactttggcccaggaagcaatcatccggcccatttcatgtttacgccttcgctgggccggttacgcgctctccgtgtaccatgtggcccatccgcccatgtggcagagagacaaacaccgaaacagacagacacgaatctcaacgcagcagcgccaccagcctcccgtcctgcctccgacgccggcgctgcggccgccgccggtgacccgcccctcgccgcggccggctgccacgaccgaccagatggccgccgcgccgtcgaggtgcctcctcgtcaccggcccgccggaatccccatcccgcaaaccccaaccgctaaaccctttctccttccttcgtcaaccgcctcacggccgccgccgccgccgccgctctcgcagggcgtggggaagacgacgctggttacgcgtgtgttcgaaaccctccgcgaatcccacccgcatctcaacattcgcggcttctacacccgcgaggtgagggagagtggggaaagggtcgggttcgaggtcgtcacgctcgatgggcgaaccgggccgctcgcctcctccaaggtttccagccgcgagtctgttagatggcctactgttgggaggtacaaagtagatatagcttctctggagtctctagcattgccggagctgcaggtcaaggacgacactgatcttttcattattgatgaagtgggtaaaatggagctgtttagttcggcattcttccctgctgtaatgagagttattgaatcgaacattccagtgctagccacaattcctgtaccaagattgggccgagacattcccggagttgcgaggttgaggaatcatcctggagcagttatttacaccttaaatactggtaatagggatgccatgagagaaggtgtctacaatcatttgagcagtctgttgcagaaaaggaatgctgttaggatcatgtcccggagaagatccaacatgaagaagcatgtctccttcaaattaaataagctgtgcttcagtgtgctgttcatcttacagcatcaagcccccacctctggatctgatctccatctccataagattcagtcgacatggatgaaacaccggagacaaggaggagaaaacatgggtccgtccagcctaatagcctgtttcagttggcagtttggaggaattattatcgctaagcatttcatggctttctcttcttcaccagcatgtaggcaaggccagctggctagaatgccaagccaagaagagattaaggcatctctcccggcatctgttaaaaatttgcaagagcgagaccccatttccacggtgggagaagcaacagtttcgccgctgatcggcggcggccggccggtggttgccggggagctgcatgctaactgcagagaggaggcacgagaggatccttcgtactgctggatctctctggcaacaagtgccaccatgctgcagtacctggacttctctcatgctagcacctcaaggaagtggtcacacaagaagcagggcgaaggatttgaagccccaaggaatagcatggagttcaccctggaggctccacaaagctatggcgtcttccaagaggatgtcccgtactcctgcaacatgaggcaacaatacccaaaagctggtctcaaccacagctcatccccaatcaagaggatcatccatgaggacgtatccttcagaacaaatgaagttcagaagagaccaagtgtcattgccaggttgatgggcatggactcacctccaatgagtacaaccgccggtgagcttgccgccggccacacggaggagaaaaggcaagacatgataacctccacaaggccaatgccaagaagagatccttctgaaatggtctcaaccaagcatgtctccttcgtgcaacacaagggctccatgaagcattcgccgaagcaagctgaggtctgtgcctacgacgacagcatggagctctttggtcagctgagcaaggcgatcagcagcagtgaatgggctaaaccgcagccgcgagagcacccgcaggaggaggagctgcagaagttcaagaaggatttcgaggcgtggcaggcgagcaggatgtgggagcagtcgagagctctggaattggagagccatctcgacgacgatgacgtcaggtgcactgacatcgtgccttacaggttccagcacagagggaaggataatgccggcaagaagcacacgcactccaatggcgacgcacactggaggaggagcaaggagagcggcaccggcaccggcacgtcgatctccggcagccggacgttctccctgacgagcgcggacgccagctcgacgcggctgccgctgtcgagattctactacgaggaggagaggctgctgtcgccgaagaagatagtgatcctgaagccctgtcccgagatgagcaccgacgacatcgaggagtcgtcgttggggtcgccggagatggtgaagaaggagaacaacatggaggccttcctcgaggaggtgaagaagcggctcaaggtcgagctcgaagggaggatggcttccgacgacagggcggcggacaggtgggccgccggcggcgacattccggctgacccgaagcagattgctcggagcatcgccaaccagatcagggagaccgtcaccaaggacctgcactcggcgttgctccggtcggagtcgacgcggtcgtaccgcagcgacatcccgctcaatggccagagccagatggactacatctgcagagatgccaggaagcacctctccgacaggctgaagaatgtgctccgacgagagccggagaccgagccgccggcactgtctcaccggagaagaaccgcctcggcgtcgttcaacgaagagccgaggccgaagccgaggcatgaggtggcaaggaagggcaagataaggagcaaggaggagaagaagcacgcgatcgagttcgacgtcaggtctttcagacgtggccaccacaaggcgtcaccaactccggcgatcgactccgacccggtatcgccgaggaacctcatcaggtcgttctcggcgccggtgtcggggaccactttcgtgaagcttctctcggaggagccgcgggtgctgaccggagcacggctgcagcgcaagcaggaaggctacgggagcaggccgccaccgccatcgtcggaggaggagaggaaggggaggaaggacacgttcaacatcaagggcagggtgtccaacctgaggcagaatctggggctgagagcgaagctgttcggcaagaagctccactccgccgacgagtcgccattccccgatgatctccctccgatcggaacgctggtcaccgccccttccgtcctcatccaccccggcgtcctccaggagaactccaccgaggtgccgccgagcccggcgtcgtggtgcagtagccctcctgatgagatgagcaggggaggttacccgagccctgtctcgccattggaggcttcgttcagcgagcaccgatctcccttgaagatggcggctagggacatgagttcgagtgcttctgaaccagagcatccatcgtcggagcaagctcaaaccgatcaagaactcgcagaaacaagtccaatccaggacgacgacgacgacgacacagacgagatagataaccccatcaaagcttacatcagagcaattcttgtcatcgccggtctgtacggacagagacgaagctctgaccaactcttctcagaccgcgaggtgaaaccgatccccgcgtgggtgttcgaggaagtcgagtcgtcgtcgtcctcctcagccccggccaccaccgactgcgacgctgcggccaccggcgtcgaccaccgcctcctcttcgacctgatcaacgagtcgctgccgcgggtcgtccagtcgtcgacgacgctgtgcgcgttcagcaggtggtacggcgcggcgccgaggagatcccccggcggcaagaggctactggacgggctgtggaacaccgtgcaggcgtggctggcgccaccgccgccgacggactcgcccaactccgtggacgagctgatcggccgcgacatgagcatgtcgccgtggaacggcccgttccgcgaggacgtcggcgcggccggcgcagagatggaggcggagatactggacgagctcgtcgacgagacgctctgggacgtgctgctcaacgtcggcgactga

SEQ ID NO: 344 - protein, 1413 aa, Oryza sativa
MYSSPKALLYLFHLAVLYRRLGPTSRTPHFGPGSNHPAHFMFTPSLGRLRALRVPCGPSAHVAERQTPKQTDTNLNAAAPPASRPASDAGAAAAAGDPPLAAAGCHDRPDGRRAVEVPPRHRPAGIPIPQTPTAKPFLLPSSTASRPPPPPPLSQGVGKTTLVTRVFETLRESHPHLNIRGFYTREVRESGERVGFEVVTLDGRTGPLASSKVSSRESVRWPTVGRYKVDIASLESLALPELQVKDDTDLFIIDEVGKMELFSSAFFPAVMRVIESNIPVLATIPVPRLGRDIPGVARLRNHPGAVIYTLNTGNRDAMREGVYNHLSSLLQKRNAVRIMSRRRSNMKKHVSFKLNKLCFSVLFILQHQAPTSGSDLHLHKIQSTWMKHRRQGGENMGPSSLIACFSWQFGGIIIAKHFMAFSSSPACRQGQLARMPSQEEIKASLPASVKNLQERDPISTVGEATVSPLIGGGRPVVAGELHANCREEAREDPSYCWISLATSATMLQYLDFSHASTSRKWSHKKQGEGFEAPRNSMEFTLEAPQSYGVFQEDVPYSCNMRQQYPKAGLNHSSSPIKRIIHEDVSFRTNEVQKRPSVIARLMGMDSPPMSTTAGELAAGHTEEKRQDMITSTRPMPRRDPSEMVSTKHVSFVQHKGSMKHSPKQAEVCAYDDSMELFGQLSKAISSSEWAKPQPREHPQEEELQKFKKDFEAWQASRMWEQSRALELESHLDDDDVRCTDIVPYRFQHRGKDNAGKKHTHSNGDAHWRRSKESGTGTGTSISGSRTFSLTSADASSTRLPLSRFYYEEERLLSPKKIVILKPCPEMSTDDIEESSLGSPEMVKKENNMEAFLEEVKKRLKVELEGRMASDDRAADRWAAGGDIPADPKQIARSIANQIRETVTKDLHSALLRSESTRSYRSDIPLNGQSQMDYICRDARKHLSDRLKNVLRREPETEPPALSHRRRTASASFNEEPRPKPRHEVARKGKIRSKEEKKHAIEFDVRSFRRGHHKASPTPAIDSDPVSPRNLIRSFSAPVSGTTFVKLLSEEPRVLTGARLQRKQEGYGSRPPPPSSEEERKGRKDTFNIKGRVSNLRQNLGLRAKLFGKKLHSADESPFPDDLPPIGTLVTAPSVLIHPGVLQENSTEVPPSPASWCSSPPDEMSRGGYPSPVSPLEASFSEHRSPLKMAARDMSSSASEPEHPSSEQAQTDQELAETSPIQDDDDDDTDEIDNPIKAYIRAILVIAGLYGQRRSSDQLFSDREVKPIPAWVFEEVESSSSSSAPATTDCDAAATGVDHRLLFDLINESLPRVVQSSTTLCAFSRWYGAAPRRSPGGKRLLDGLWNTVQAWLAPPPPTDSPNSVDELIGRDMSMSPWNGPFREDVGAAGAEMEAEILDELVDETLWDVLLNVGD

SEQ ID NO: 345 - DNA, 1950 bp, Oryza sativa
  CDS (1)..(1950)
atggcgggcaagggcgagggtccggccatcggcatcgaccttggcacgacctactcgtgcgtgggcgtttggcagcacgaccgcgtggagatcatcgccaacgaccagggcaaccgcaccaccccctcctacgtcggcttcaccgactccgagaggctcatcggagatgctgccaagaaccaggtcgccatgaaccccatcaacaccgtcttcgatgccaagcgtctcattggcaggaggtttagcgatgcttctgttcagagtgacattaagctctggcccttcaaggtgattgctggacctggtgacaagcctatgattgttgtccagtacaagggtgaggagaagcagtttgctgccgaagagatctcctccatggtcctcatcaagatgcgtgagattgctgaggcctaccttggcaccaccatcaagaatgccgttgtcactgttcctgcctacttcaatgactcccagaggcaggccaccaaggatgctggagtgattgctggtctcaatgtcatgcgcatcatcaacgagccaactgctgccgctattgcctatggtcttgacaagaaggccaccagcgttggtgagaagaatgtcctcatctttgaccttggaggtggtacctttgatgtttccctccttaccattgaggagggtatctttgaggtcaaggccacagctggtgacacccatcttggtggtgaagattttgacaaccgcatggtcaaccactttgtgcaagaattcaagaggaagaacaagaaggatatcactggcaaccccagggctctcaggaggttgaggacagcttgtgagagggcgaagaggaccctgtcctccactgcccagaccaccattgagatcgattccttgtatgagggcatcgatttctactcaaccatcacccgtgccaggtttgaggagctcaacatggatctcttcaggaagtgtatggagcctgtggagaagtgcctcagggatgctaagatggacaagagctctgttcatgatgttgttcttgttggtggctccactaggatcccgagggtgcagcagctcctgcaggatttcttcaacggcaaggagctttgcaagaacatcaacccagatgaggctgttgcttatggtgctgctgtccaggctgccatcttgagtggtgagggcaacgagaaggtccaggacctcctcctgttggatgttacccctctttctctcggtttggagactgctggtggtgtcatgaccgtcttgatcccaaggaacaccaccattcccaccaagaaggagcaggtcttctccacctactctgacaaccagcctggtgtgctcatccaggtttatgagggtgagaggaccaggacacgtgacaacaacctgctgggcaagtttgagctctctggaatccctcctgctcccaggggtgttccacagatcactgtttgcttcgacattgatgccaatggtatcctgaacgtgtctgctgaggacaagaccaccgggcagaagaacaagatcaccatcaccaacgacaagggcaggctcagcaaggaggagattgagaagatggtccagggggccgagaagtacaagtcagaggatgaggagcacaagaagaaggtggagtccaagaacgcgctggagaactacgcctacaacatgcgcaacaccatcaaggatgagaagatcgcctcgaagctcccggcagcggacaagaagaagatcgaggatgccatcgaccaggccatccagtggctggacggcaaccagctcgctgaggctgatgagttcgatgacaagatgaaggagctggagggcatctgcaaccccatcatcgccaagatgtaccagggcgctggcgcggacatggccggcggcatggacgaggacgatgctcccccggctggcggcagcggtgctggccccaagatcgaggaggtcgactaa

SEQ ID NO: 346 - protein, 649 aa, Oryza sativa
MAGKGEGPAIGIDLGTTYSCVGVWQHDRVEIIANDQGNRTTPSYVGFTDSERLIGDAAKNQVAMNPINTVFDAKRLIGRRFSDASVQSDIKLWPFKVIAGPGDKPMIVVQYKGEEKQFAAEEISSMVLIKMREIAEAYLGTTIKNAVVTVPAYFNDSQRQATKDAGVIAGLNVMRIINEPTAAAIAYGLDKKATSVGEKNVLIFDLGGGTFDVSLLTIEEGIFEVKATAGDTHLGGEDFDNRMVNHFVQEFKRKNKKDITGNPRALRRLRTACERAKRTLSSTAQTTIEIDSLYEGIDFYSTITRARFEELNMDLFRKCMEPVEKCLRDAKMDKSSVHDVVLVGGSTRIPRVQQLLQDFFNGKELCKNINPDEAVAYGAAVQAAILSGEGNEKVQDLLLLDVTPLSLGLETAGGVMTVLIPRNTTIPTKKEQVFSTYSDNQPGVLIQVYEGERTRTRDNNLLGKFELSGIPPAPRGVPQITVCFDIDANGILNVSAEDKTTGQKNKITITNDKGRLSKEEIEKMVQGAEKYKSEDEEHKKKVESKNALENYAYNMRNTIKDEKIASKLPAADKKKIEDAIDQAIQWLDGNQLAEADEFDDKMKELEGICNPIIAKMYQGAGADMAGGMDEDDAPPAGGSGAGPKIEEVD

SEQ ID NO: 347 - protein, 230 aa, Artificial Sequence
  Artificial consensus sequence of alignment in Figure 3
MGRGRVELKRIENKINRQVTGSKRRNGLLKKAYELSVLCDAEVALIIFSSRGKLYEFASSSMTKTLERYQRYSYAESAVISAESETQGSWYQEYLKLKAKVEALQKTQRHLLGEDLESLSLKELQQLEKQLESSLKHIRSRKTQLLLEQISELQRKEKSLQEENKVLQKKLVETEKGQQVQQQGWDQGQGQTPAQQPPHSSSFHREAAEPTLNIGYAAGERIAQLPPWML

SEQ ID NO: 348 - protein, 224 aa, Oryza sativa
MGRGKIEIKRIENATNRQVTYSKRRTGIMKKARELTVLCDAQVAIIMFSSTGKYHEFCSPSTDIKGIFDRYQQAIGTSLWIEQYENMQRTLSHLKDINRNLRTEIRQRMGEDLDGLEFDELRGLEQNVDAALKEVRHRKYHVITTQTETYKKKVKHSYEAYETLQQELGLREEPAFGFVDNTGGGWDGGAGAGAAADMFAFRVVPSQPNLHGMAYGGNHDLRLG

SEQ ID NO: 349 - protein, 249 aa, Oryza sativa; identical to SEQ ID NO: 242
